(19) United States
(12) Patent Application Publication
(10) Pub. No.: US 2010/0286043 A1
(43) Pub. Date: Nov. 11, 2010

(54) USE OF NEUREGULIN-1 IN REDUCING BRAIN DAMAGE

(75) Inventors: Christiane E.L. Dammann, Newton, MA (US); Olaf Dammann, Newton, MA (US)

Correspondence Address: NUTTER MCCLENNEN & FISH LLP, SEAPORT WEST, 155 SEAPORT BOULEVARD, BOSTON, MA, 02210-2604, US

(73) Assignee: Tufts Medical Center, Inc., Boston, MA (US)

(21) Appl. No.: 12/681,707

(22) PCT Filed: Oct. 6, 2008
(86) PCT No.: PCT/US2008/078995

§ 371 Date: Jul. 9, 2010

Related U.S. Application Data
(60) Provisional application No. 60/977,750, filed on Oct. 5, 2007.

(51) Int. Cl. A61K 38/18; G01N 33/68; C12Q 1/68; A61P 25/00

(52) U.S. Cl. 514/9.6; 436/86; 435/6

(57) ABSTRACT

Methods of reducing and/or protecting against disorders in perinatal subjects are disclosed. Such methods can be used for disorders associated with neuronal cell damage. In certain aspects, the method comprises administering a therapeutically effective amount of neuregulin or a biologically active analog with a pharmaceutical carrier to a perinatal subject. In addition, the perinatal subject can be a fetus where the neuregulin is administered to the pregnant mother. Methods for assessing whether a perinatal subject is at risk for developing a neurological disorder are also disclosed. For example, expression levels of neuregulin can be used as an indication the perinatal subject is at risk for developing a disorder associated with neuronal cell damage. Evaluating the genotype of the NRG locus in a perinatal subject can also be used as an indicator of the risk of developing neurological disorders.

### CROSS REFERENCE TO RELATED APPLICATIONS

[0001] The present application claims the benefit of U.S. Provisional Application No. 60/977,750 filed on Oct. 5, 2007, entitled “Use of Neuregulin-1 in Reducing Brain Damage.” The entire contents of the provisional application are hereby incorporated herein by reference.

### GOVERNMENT SUPPORT

[0002] The invention was supported by National Institutes of Health Grant No.: 5K08HL004436-05. The government has certain rights in the invention.

### FIELD OF THE INVENTION

[0003] The present invention concerns therapeutic agents for treatment of neurological conditions and, in particular, therapeutic agents for reducing the risk of brain damage in perinatal subjects.

### BACKGROUND OF THE INVENTION

[0004] Nearly a half of a million infants are born prematurely (less than 37 weeks gestation) each year, according to the report released by the National Center for Health Statistics (NCHS). The prematurity rate has increased nearly every year since 1981. These pre-term infants often present neurodevelopmental deficits which comprise global cognitive delay, cerebral palsy, blindness, and deafness.

[0005] While the cause of most cases of white matter damage in newborns is unknown, infants born at or before 28 weeks gestation appear to be at highest risk of brain white matter damage (WMD, 18-36%) which in turn is associated with an elevated risk of later neurologic and cognitive limitations. A common example of white matter injury observed in infants as a complication of premature birth is referred to as periventricular leukomalacia (PVL). PVL is the principal neuropathological correlate of cerebral palsy. PVL is characterized by focal necrosis of the deep periventricular white matter involving all cellular components, combined with a more diffuse white matter injury that appears selective for developing oligodendrocytes (OLs). Reduced cerebral myelin is the most prominent subsequent cerebral abnormality observed in premature infants with evidence of PVL in the neonatal period.

[0006] Deficits such as cognitive delay and cerebral palsy may be attributed, at least in part, to both endogenous and exogenous components. Exogenous components could be infection/inflammation, hypoxia-ischemia, and excitotoxicity in white and/or gray matter of the brain. One of the endogenous components is the paucity of developmentally regulated protectors, such as neuregulin.

[0007] Neuregulins (NRGs) play important roles during fetal brain, heart and lung development, and are involved in inflammatory damage processes. There are several NRG isoforms, all produced by alternative splicing of the same region on human chromosome 8p22 and all containing an EGF-like domain. One of these isoforms, NRG-1β, appears to help signal the onset of surfactant synthesis in the fetal lung. There is also increasing evidence for a protective function in experimental brain ischemia and in the etiology of several adult neurologic diseases. A number of recent reports have shown that administration of NRG-1 reduces delayed ischemic cortical damage following transient middle cerebral artery occlusion when administered before the onset of ischemia in adult rats.

[0008] However these studies fail to address the potentially protective factor of neuregulin in the neonatal brain.

### SUMMARY OF THE INVENTION

[0009] In one aspect, the invention discloses a method of reducing and/or protecting against disorders associated with neuronal cell or oligodendrocyte (OL) damage in a perinatal subject in need thereof, comprising administering a therapeutically effective amount of neuregulin (NRG) and a pharmaceutically acceptable carrier to the perinatal subject. The invention can also comprise administering neuregulin-1 (NRG-1), one of the proteins within the neuregulin family. The perinatal subject of the invention can be a neonate and/or a fetus. In one embodiment, the perinatal subject can be a neonate born prior to 32 weeks of gestation. In some instances where the subject is a fetus, neuregulin can be delivered to a pregnant mother such that therapeutically effective amounts of neuregulin can be administered to the fetus. Alternatively, therapeutically effective amounts of neuregulin can be delivered directly to the fetus. In another embodiment, the method further comprises increasing expression of ErbB-receptors as a method to increase activation of specific signaling pathways. NRG and its ErbB receptors can influence the growth and maturation of immature oligodendrocytes, and maturation can be disordered when a full complement of NRG protein and receptor are not available. Thus NRG induced activation and orchestration of ErbB signaling pathways can be accomplished through increasing ErbB-receptor expression and activation of distinct ErbB signaling pathways for potential interaction with the administered neuregulin.

[0010] In one embodiment, neuregulin can be administered in conjunction with an endogenous and/or exogenous protector. In some embodiments, the co-administration of neuregulin with at least one endogenous and/or exogenous protector can produce synergistic effects. Non-limiting examples of exogenous protectors that can be used in conjunction with the present invention comprise caffeine and/or indomethacine. Endogenous protectors can be, for example, one or more glucocorticoids and thyroid hormones. Non-limiting examples of glucocorticoids that can be used in this invention comprise dexamethasone, hydrocortisone, alclometasone, amcinonide, beclometasone, betamethasone, budesonide, ciclesonide, clobetasol, clobetasone, clocortolone, cloprednol, cortivazol, deflazacort, deoxycorticosterone, desonide, desoximetasone, diflorasone, diflucortolone, difluprednate, fluclorolone, fludrocortisone, fludroxycortide, flumetasone, flunisolide, fluocinolone acetonide, fluocinonide, fluocortin, fluocortolone, fluorometholone, fluperolone, fluprednidene, fluticasone, formocortal, halcinonide, halometasone, hydrocortisone aceponate, hydrocortisone buteprate, hydrocortisone butyrate, loteprednol, medrysone, meprednisone, methylprednisolone, methylprednisolone aceponate, mometasone furoate, paramethasone, prednicarbate, prednisone, prednisolone, prednylidene, rimexolone, tixocortol, triamcinolone, ulobetasol.

[0011] The administration of the therapeutically effective amount of NRG can be at least one of an oral administration, a parenteral administration, an intravenous administration, an intramuscular administration, an intraamniotic administration, a sub-cutaneous administration, a transdermal administration, an intratechal administration, a rectal administration, intravaginal administration, intra peritoneal or amniotic administration, and an intranasal administration.

[0012] In another aspect, the invention can provide a method of assessing whether a perinatal subject is at risk for developing a neurological disorder associated with neuronal cell damage that comprises evaluating levels of neuregulin. In the instances where neuregulin levels are reduced level or lacking, the perinatal subject can be at risk for developing the disorder. The perinatal subject of the invention can be a neonate and/or a fetus. In one embodiment, the perinatal subject can be a neonate born prior to 32 weeks of gestation.

[0013] In one embodiment the invention can comprise measuring expression levels of neuregulin and can further comprise measuring expression levels of ErbB receptors when evaluating the risk of developing a neurological disorder. In another embodiment, measuring expression levels of neuregulin can comprise measuring levels of at least one of a ribonucleic acid, a deoxyribonucleic acid and a protein. In addition, the invention can also comprise analyzing the neuregulin gene for one or more single nucleotide polymorphism where one or more polymorphism can be SNP8NRG221533, a polymorphism in the NRG gene that can lead to a low production of NRG protein.

[0014] In another embodiment, the invention can comprise evaluating activation levels of neuregulin signaling pathways. Since neuregulin can stimulate the tyrosine phosphorylation of ErbB receptors and activate downstream signal transduction pathways, activation levels can be influenced by genetic modifications that exist in ErbB receptor genetic loci. In one embodiment, the step of evaluating levels further comprises analyzing at least one ErbB receptor gene for one or more single nucleotide polymorphism. In some embodiments the neurological disorders can be at least one of cerebral palsy, mental retardation and leaning disabilities.

[0015] In another aspect, the invention provides a method of evaluating a risk of a NRG-1 deficiency in a perinatal subject that comprises assaying a sample from the perinatal subject for a polymorphism associated with decreased expression of NRG-1. In some embodiments, the perinatal subject can be a neonate and/or a fetus. In yet another embodiment, the sample to be assayed can be obtained from a fetus in a pregnant subject, or the pregnant subject itself.

[0016] In another aspect, the invention provides a method of evaluating risk of a neuregulin deficiency in a perinatal subject that comprises providing a nucleic acid sample from the perinatal subject, determining a single nucleotide polymorphism (SNP) genotype of neuregulin and comparing the SNP genotype with a predetermined SNP genotype whereby the perinatal subject is predicted to be at risk of a neuregulin deficiency if the SNP genotype comprises at least one of a SNP8NRG221132, a SNP8NRG221533, a SNP8NRG241930, a SNP8NRG243177 and a SNP8NRG433E1006.

[0017] In another aspect, the invention provides a method of diagnosing or predicting risk of a neuregulin deficiency in a perinatal subject comprising determining a presence or absence of a neuregulin polymorphism where the polymorphism is at least one of a SNP8NRG221132, a SNP8NRG221533, a SNP8NRG241930, a SNP8NRG243177 and a SNP8NRG433E1006. In one embodiment, determining the presence or absence of a polymorphism comprises enzymatic amplification of nucleic acid from the perinatal subject. Furthermore, the enzymatic amplification can be a step of a polymerase chain reaction protocol. Another embodiment can utilize restriction fragment length polymorphism analysis to determine the polymorphism. In some aspects of the invention, sequence analysis can be used to determine the presence or absence of the polymorphism. In yet one more embodiment, the method comprises determining the presence of a SNP8NRG221533 polymorphism.

### DETAILED DESCRIPTION OF THE INVENTION

[0018] Given the lack of methods for treating pre-term infants with neurodevelopmental deficits where neuregulin's effect on the developing brain is missing or deficient, a need exists in the art for new methods of reducing and/or preventing brain damage in neonates. In particular, new methods capable of reducing white brain matter damage would satisfy a long-felt therapeutic need.

[0019] The terms used in this invention are, in general, expected to adhere to standard definitions generally accepted by those having ordinary skill in the art of neurobiology. A few exceptions, as listed below, have been further defined within the scope of the present invention. Other terms are defined explicitly elsewhere in the present application, implicitly through the context of their usage in the present application, and/or having their ordinary meaning as understood by those skilled in the art.

[0020] The terms “neuronal” and “neural” are used interchangeably and pertain to the cells of the brain, spinal cord and peripheral nerve cord (nervous system). Examples of cells of the nervous system comprise but are not limited to: neurons, oligodendrocytes, astrocytes, ependymal cells, microglia, satellite cells and Schwann cells.

[0021] The terms “disorders associated with neuronal cell damage,” “disorders associated with neuronal cell death,” and “neurological disorder” refer to an impairment or absence of a normal neurological function or presence of an abnormal neurological function in a subject. Such disorders comprise disorders characterized by injury and/or death to brain cells, including white matter cells and/or gray matter cells. For example, neurological disorders can be the result of disease, endogenous, or exogenous injury. As used herein, neurological disorder also comprises neurodegeneration and chronic inflammation which causes morphological and/or functional abnormality of a neural cell or a population of neural cells.

[0022] Non-limiting examples of morphological and functional abnormalities comprise physical deterioration and/or death of neural cells, abnormal growth patterns of neural cells, abnormalities in the physical connection between neural cells, under- or over production of a substance or substances, e.g., a neurotransmitter, by neural cells, failure of neural cells to produce a substance or substances which it normally produces, production of substances, e.g., neurotransmitters, and/or transmission of electrical impulses in abnormal patterns or at abnormal times. Such disorders comprise, but are not limited to, periventricular leukomalacia (PVL), cerebral palsy, mental retardation, stroke, epilepsy, seizures, dementia, memory loss, and attention deficit disorder (ADD).

[0023] Neurological disorders also comprise neurodegenerative diseases. Neurodegeneration can occur in any area of the brain of a subject and can be seen with many disorders comprising, but not limited to, Amyotrophic Lateral Sclerosis (ALS), multiple sclerosis, Huntington's disease, Parkinson's disease and Alzheimer's disease. Further neurological disorders comprise CNS (central nervous system) damage resulting from infectious diseases such as viral encephalitis, bacterial or viral meningitis and CNS damage from tumors. The neuroprotective and/or neural regenerative strategy of the present invention can also be used to improve the cell-based replacement therapies used to treat or prevent various demyelinating and dysmyelinating disorders, such as Pelizaeus-Merzbacher disease, multiple sclerosis, various leukodystrophies, post-traumatic demyelination, and cerebrovasuclar accidents. Disorders of the central nervous system further comprise mental disorders such as mood disorders (i.e., depression, bipolar disorder), anxiety disorders, autism spectrum disorders, memory disorders and schizophrenic disorders. In addition, the present invention can also find use in enhancing the cell-based therapies used to repair damaged spinal cord tissue following a spinal cord injury.

[0024] The term “mental retardation” is intended to refer to sub-average intellectual ability that is equivalent to or less than an IQ of 70, can be present from birth or infancy, and can be manifested by abnormal development, by learning difficulties, or by problems in social adjustment. Mental retardation can often be observed in preterm infants, particularly those of low birth weight and gestational age.

[0025] The term “neonatal stroke” refers to sudden diminution or loss of consciousness, sensation, and voluntary motion caused by rupture or obstruction (as by a clot) of an artery of the brain which occurs in a baby up to one year old.

[0026] The term “cerebral palsy” is intended to refer to a disability resulting from damage to the brain before, during or shortly after birth and outwardly manifested by muscular coordination and speech disturbances. Cerebral palsy can be caused by damage to one or more specific areas of the brain during development. The causes of cerebral palsy are diverse and comprise genetic, metabolic, infectious, traumatic, endocrine, and hypoxic/ischemic disorders. As used herein, the terms “hypoxic” and “hypoxia” refer to a deficiency of oxygen reaching the tissues of the body. The terms “ischemic” and “ischemia”, as used herein, refer to localized tissue anemia due to obstruction of the inflow of arterial blood.

[0027] The term “excitotoxicity” is art recognized and is intended to refer to increased levels of excitatory amino acids which are toxic to neurons. This may occur when protective mechanisms are inhibited by ischemia or inflammation.

[0028] The terms “gray matter injury” and “white matter injury” are intended to refer to injury to the gray or white matter of the brain. Such injury comprises injury to brain cells (e.g., white matter injury) and brain cell death (e.g., white matter cell death and myelin basic protein loss). As used herein, “gray matter” refers to neural tissue of the brain that contains cell bodies as well as nerve fibers, has a brownish gray color, and can form most of the cortex and nuclei of the brain. As used herein, “white matter” refers to neural tissue that consists largely of myelinated nerve fibers, has a whitish color, and underlies the gray matter of the brain.

[0029] The term “PVL” is intended to refer to certain type of damage and softening of the white matter, the inner portion of the brain that transmits information between the nerve cells and the spinal cord, as well as from one part of the brain to another. PVL is characterized by focal necrosis with a loss of all cellular elements deep in the periventricular white matter, and diffuse white matter involvement characterized by injury to glial cells which are thought to be oligodendrocyte precursors.

[0030] The terms “neonate” and “neonatal” are intended to refer to infants up to one year old. In the context of the present invention, the neonates are typically preterm infants. As used herein, the term “preterm” is intended to refer to a baby born at a gestational age of less than 266 days or 38 weeks.

[0031] The terms “fetus” and “fetal” are intended to refer to a developing human from approximately three months after conception to birth.

[0032] The term “perinatal” is intended to refer to the period shortly before and after birth, art defined as beginning with completion of 20-28 weeks of gestation and ending 7 to 28 days after birth.

[0033] The terms “neuregulin,” “NRG,” “neuregulin-1” and “NRG-1” are used interchangeably to refer to proteins or peptides that can bind and activate ErbB3 or ErbB4 protein kinases, such as all neuregulin-1 isoforms, neuregulin EGF domain alone, neuregulin mutants, biologically active analogs of neuregulin, and any kind of neuregulin-like gene products that also activate the above receptors. Neuregulin also comprises neuregulin-1 (NRG-1), neuregulin-2 (NRG-2), neuregulin-3 (NRG-3), and neuregulin-4 (NRG-4). Neuregulin is also known as heregulin, neu differentiation factor, glial growth factor, acetylcholine receptor-inducing activity, and sensory and motor neuron-derived factor. Neuregulin also comprises variants with conservative amino acid substitutions that do not substantially alter their biological activity. Suitable conservative substitutions of amino acids are known to those of skill in this art and may be made generally without altering the biological activity of the resulting molecule. Those of skill in this art can recognize that, in general, single amino acid substitutions in non-essential regions of a polypeptide do not substantially alter biological activity.

[0034] The terms “functional” or “bioactive,” as used interchangeably herein, refer to mean a NRG-derived peptide having a non-amino acid chemical structure that mimics the structure of NRG or a NRG-derived peptide and retains the bioactivity and function of NRG in cellular and animal models. The function may comprise an improved desired activity or a decreased undesirable activity. Such a mimetic generally is characterized as exhibiting similar physical characteristics such as size, charge or hydrophobicity in the same spatial arrangement found in NRG or the NRG-derived peptide counterpart. A specific example of a peptide mimetic is a compound in which the amide bond between one or more of the amino acids is replaced, for example, by a carbon-carbon bond or other bond well known in the art (see, for example, Sawyer, Peptide Based Drug Design, ACS, Washington (1995), which is incorporated herein by reference). Non-limiting tests for a functional NRG are disclosed below. The peptides of the present invention are intended to be functional in at least one bioactivity assay. Tests for functionality are described below.

[0035] As used herein, “a” or “an” means “at least one” or “one or more.” The terms “comprising,” “having,” “including,” and “containing” are to be construed as open-ended terms (i.e., meaning “including, but not limited to,”) unless otherwise noted. Recitation of ranges of values herein are merely intended to serve as a shorthand method of referring individually to each separate value falling within the range, unless otherwise indicated herein, and each separate value is incorporated into the specification as if it were individually recited herein.

[0036] As used herein, “vector (or plasmid)” refers to discrete elements that are used to introduce heterologous deoxyribonucleic acid (DNA) into cells for either expression or replication thereof. Selection and use of such vehicles are well known within the skill of the artisan. An expression vector comprises vectors capable of expressing DNAs that are operatively linked with regulatory sequences, such as promoter regions, that are capable of effecting expression of such DNA fragments. Thus, an expression vector refers to a recombinant DNA or ribonucleic acid (RNA) construct, such as a plasmid, a phage, recombinant virus or other vector that, upon introduction into an appropriate host cell, results in expression of the cloned DNA. Appropriate expression vectors are well known to those of skill in the art and comprise those that are replicable in eukaryotic cells and/or prokaryotic cells and those that remain episomal or those which integrate into the host cell genome.

[0037] As used herein, “a promoter region or promoter element” refers to a segment of DNA or RNA that controls transcription of the DNA or RNA to which it is operatively linked. The promoter region comprises specific sequences that are sufficient for RNA polymerase recognition, binding and transcription initiation. This portion of the promoter region is referred to as the promoter. In addition, the promoter region comprises sequences that modulate this recognition, binding and transcription initiation activity of RNA polymerase. These sequences may be cis acting or may be responsive to trans acting factors. Promoters, depending upon the nature of the regulation, may be constitutive or regulated. Exemplary promoters contemplated for use in prokaryotes comprise the bacteriophage T7 and T3 promoters, and the like.

[0038] As used herein, “operatively linked” or “operationally associated” refers to the functional relationship of DNA with regulatory and effector sequences of nucleotides, such as promoters, enhancers, transcriptional and translational stop sites, and other signal sequences. For example, operative linkage of DNA to a promoter refers to the physical and functional relationship between the DNA and the promoter such that the transcription of such DNA is initiated from the promoter by an RNA polymerase that specifically recognizes, binds to and transcribes the DNA. In order to optimize expression and/or in vitro transcription, it may be necessary to remove, add or alter 5′ untranslated portions of the clones to eliminate extra, potential inappropriate alternative translation initiation (i.e., start) codons or other sequences that may interfere with or reduce expression, either at the level of transcription or translation. Alternatively, consensus ribosome binding sites (see, e.g., Kozak, J. Biol. Chem., 266:19867-19870 (1991)) can be inserted immediately 5′ of the start codon and may enhance expression. The desirability of (or need for) such modification may be empirically determined.

[0039] The term “subject” refers to any living organism in which an immune response can be elicited. The term subject comprises, but is not limited to, humans, nonhuman primates such as chimpanzees and other apes and monkey species; farm animals such as cattle, sheep, pigs, goats and horses; domestic mammals such as dogs and cats; laboratory animals including rodents such as mice, rats and guinea pigs, and the like. The term does not denote a particular age or sex. Thus, adult and newborn subjects, as well as fetuses, whether male or female, are intended to be covered. In preferred embodiments, the subject is a mammal, including humans and non-human mammals. In a more preferred embodiment, the subject is a mammal. In the most preferred embodiment, the subject is a human.

[0040] The invention is described in more detail in the following subsections:

### I. Risk Factors for Brain Damage in Pre-Term Infants

[0041] An improved understanding of this maturity related risk for infants can be of major importance for those who wish to prevent neonatal brain damage and its long-term adverse developmental consequences. One traditional explanation is that preterm infants are (endogenously) more vulnerable to exogenous insults. Therefore, it was thought that improved neonatal care should lead to reduced white matter damage (WMD) risk and improved outcome. However, recent observational studies indicate that this hypothesis may not be true.

[0042] Another explanation for increased vulnerability of preterm infants is that they are more likely than their fullterm peers to experience exogenous insults. For example, intrauterine infection is both a risk factor for perinatal brain damage and is observed more frequently in the placentas of preterm infants than fullterm infants. Thus, the increased WMD risk of preterm infants can reflect their higher likelihood of being exposed to adversity.

[0043] The invention is based, in part, on the discovery that neuregulin can be an endogenous perinatal neuronal protector. NRG plays a role in neuronal development and is shown to be protective against potentially damaging mechanisms, such as mechanisms that lead to neuronal cell damage and/or death. These mechanisms comprise, but are not limited to, infection/inflammation, hypoxia-ischemia, and excitotoxicity. In addition, NRG can also be used to prevent, and or treat neuropsychiatric disorders, such as schizophrenia where patients exhibit altered levels of neuregulin function and display hypofunction of neuronal synapses.

[0044] In some embodiments, additional endogenous protectors can be co-administered with NRG to reduce the risk of prenatal brain damage. Low gestational age is a surrogate not only for increased vulnerability and adverse exposures, but also for many other endogenous and exogenous factors. Among these are substances that can be called ‘endogenous protectors’. Substances that qualify as endogenous protectors (a) can be endogenously available to the organism, (b) can be protective in experimental models of disease, (c) can offer biologically plausible interactions with presumed pathways of damage, and (d) can be associated with a decreased risk for perinatal brain damage in humans. Non-limiting examples of endogenous protectors comprise glucocorticoid and thyroid hormones.

[0045] Glucocorticoids are catabolic steroids that break down stored resources (fats, sugars and proteins) so that they can be used as fuels in times of stress. Glucocorticoids are characterized by the ability to bind with the cortisol receptor and trigger similar effects, including anti-inflammatory and immunosuppressive properties. They can even promote cell differentiation of specific cells at specific time points in development. Non-limiting example of glucocorticoids useful with this invention comprise dexamethasone, hydrocortisone, alclometasone, amcinonide, beclometasone, betamethasone, budesonide, ciclesonide, clobetasol, clobetasone, clocortolone, cloprednol, cortivazol, deflazacort, deoxycorticosterone, desonide, desoximetasone, diflorasone, diflucortolone, difluprednate, fluclorolone, fludrocortisone, fludroxycortide, flumetasone, flunisolide, fluocinolone acetonide, fluocinonide, fluocortin, fluocortolone, fluorometholone, fluperolone, fluprednidene, fluticasone, formocortal, halcinonide, halometasone, hydrocortisone aceponate, hydrocortisone buteprate, hydrocortisone butyrate, loteprednol, medrysone, meprednisone, methylprednisolone, methylprednisolone aceponate, mometasone furoate, paramethasone, prednicarbate, prednisone, prednisolone, prednylidene, rimexolone, tixocortol, triamcinolone, ulobetasol.

[0046] Hypothyroidism can adversely affect the neurological development and must be treated as soon as it is diagnosed. Preterm infants are prone to develop various degrees of deficiency. The thyroid produces two major hormones which regulate metabolism. Thyrotropin releasing hormone (TRH) made by the hypothalamus stimulates the release of thyroid stimulating hormone (TSH) from the anterior pituitary which regulates the production and release of thyroid hormones. There are several brand names of thyroid hormone available that contain the same synthetic thyroxine (T4).

### II. Neuregulin (NRG)

[0047] Neuregulins are a family of multipotent growth factors that comprise acetylcholine receptor inducing activities (ARIAs), growth factors, heregulins, and neu differentiation factors. Sequence information of human NRG-1 can be found, for example, under Accession No. Q02297, NCBI Accession No: AAA58639.1 (SEQ ID: 1). Various isomers can be found, for example, under Accession Nos. Q02297-1, (Alpha) (SEQ ID: 2), Q02297-2 (Alpha1A) (SEQ ID: 3), Q02297-3 (Alpha2B) (SEQ ID: 4), Q02297-4 (Alpha3) (SEQ ID: 5), Q02297-6 (Beta1, Beta1A) (SEQ ID: 6), Q02297-7 (Beta2) (SEQ ID: 7), Q02297-8 (Beta3, GGFHFB1) (SEQ ID: 8), Q02297-9 (GGF2, GGFHPP2) (SEQ ID: 9), Q15491-1 (SMDF) (SEQ ID: 10).

[0048] Neuregulins are developmentally regulated growth factors. Functionally, they play a critical role in the developing heart, nervous, and mammary systems. For example, neuregulin-1β was found to be secreted by the fetal lung fibroblast and stimulated control of fetal lung maturation through mesenchymal-epithelial interactions in a paracrine mechanism similar to the mechanism described for the developing heart, brain, and mammary systems.

[0049] The effects of neuregulins can be mediated through an interaction with ErbB receptors, a class of tyrosine kinase receptors related to the epidermal growth factor receptor. Neuregulins stimulate the tyrosine phosphorylation of these receptors and the subsequent activation of various signal transduction mechanisms. Neuregulins are synthesized as transmembrane precursors consisting of either an immunoglobulin-like or cysteine-rich domain, and EGF-like domain, a transmembrane domain, and a cytoplastic tail. The EGF-like domain of NRG-1 appears to be sufficient for activation.

[0050] Neuregulin-1 (NRG-1) was originally identified as a 44-kD glycoprotein that interacts with the Neu/ErbB2 receptor tyrosine kinase to increase its phosphorylation on tyrosine residues. The receptors for all NRG-1 isoforms are the ErbB family of tyrosine kinase transmembrane receptors. Through interaction with ErbB receptors, NRG-1 isoforms induce the growth and differentiation of epithelial, neuronal, glial, and other types of cells.

[0051] NRG-1 is the best-studied member and the prototype of a family of polypeptide growth factors encoded by four distinct genes, i.e., NRG-1, NRG-2, NRG-3, and NRG-4. NRG-1 binds and activates Erb3 and Erb4. Sequence information of NRG-2 can be found, for example, under Accession Nos. O14511 (SEQ ID: 11) and Q3MI86 (SEQ ID: 12). Sequence information of NRG-3 can be found, for example, under Accession Nos. P56975 (SEQ ID: 13), Q5VYH3 (SEQ ID: 14), Q6ZWG6 (SEQ ID: 15). Sequence information of NRG-4 can be found, for example, under Accession Nos. Q0P6N4 (SEQ ID: 16).

[0052] All 16 known isoforms of NRG-1 are encoded by the same gene and result from alternative splicing and usage of different promoters. A classification system (type I-III) is based on the type of epidermal growth factor (EGF)-like domain, N-terminal sequence, and initial synthesis as transmembrane or non-membrane protein. Type I NRG-1, also known as heregulin or NDF, contains an N-terminal immunoglobulin (Ig)-like domain prior to the EGF-like domain, which is followed by a specific hydrophobic stretch and a unique C-terminal domain. The EGF-like domain in type I NRG-1 can be either the alpha or beta variant, depending on whether the transcript comprises exon 7 or 8, respectively. Type II NRG-1, or glial growth factor-2 (GGF2), contains an N-terminal signal peptide, a Kringle-like domain, and an Ig-like domain prior to the EGF-like domain (beta variant). Type III NRG-1, or sensory and motor neuron-derived factor (SMDF), contains a unique N terminus with a hydrophobic stretch prior to the EGF-like domain (beta variant). Three additional types (IV-VI) are theoretically possible.

[0053] Single nucleotide polymorphisms (SNPs) are a genetic variation occurring when a single nucleotide differs, between members of the same species or between paired chromosomes in the same organism. Within a population, SNPs are typically assigned the minor or lower frequency allele at a genetic locus. When SNPs fall within the coding region of the gene, SNPs can result in the substitution of an amino acid in the protein sequence. In other instances, some SNPs can result in the termination of a protein sequence or a silent mutation with no change in protein sequence. On the other hand, the functional consequences of SNPs outside the coding region is less certain. In some cases, SNPs have been identified in regions upstream of the coding sequences, a potential promoter region, and have affected gene expression.

[0054] Several dozen SNPs have been identified in the neuregulin genetic locus. In many instances, SNPs within neuregulin have been associated with schizophrenia and potentially Alzheimer's disease, however the functions of most SNPs remain unknown since the majority of the SNPs are in noncoding regions of the locus. Common SNP sites within the neuregulin gene locus can comprise but are not limited to: SNP8NRG221132 (single nucleotide polymorphism “R”) (SEQ ID: 17), SNP8NRG221533 (single nucleotide polymorphism “Y”) (SEQ ID: 18), SNP8NRG241930 (single nucleotide polymorphism “K”) (SEQ ID: 19), SNP8NRG243177 (single nucleotide polymorphism “Y”) (SEQ ID: 20), and SNP8NRG433E1006 (nucleotide polymorphisms “R” and “Y”) (SEQ ID: 21).

### III. ErbB Signaling Pathways

[0055] NRG-1 and its ErbB tyrosine kinase receptors (ErbB 1-4) are highly expressed in the adult rodent and human brain. However, their functions are not well known. NRG-1 is expressed in CA3 pyramidal neurons that project to CA1, accumulates at various central synapses including the hippocampal CA1 molecular layer, and is processed and released at synapses in an activity dependent manner. In the adult brain, ErbB and NMDA receptors co-localize at glutamatergic postsynaptic sites and interact with PDZ (postsynaptic density 95/Discs large/zona occludens-1)-domain scaffolding proteins.

[0056] The ErbB receptors are a family of four transmembrane receptors, that bind multiple growth factors, including EGF, transforming growth factor-α, and NRG-1-4, among others. ErbB1, also known as the EGF receptor, does not bind NRG-1, while ErbB3 and ErbB4 do serve as its receptors. Historically, interest in ErbB receptors is rooted in their role as part of the erythroblastosis virus oncogene (v-Erb), which bears two domains in chickens, v-ErbA and v-ErbB. One line of interest in NRGs and ErbB receptors is in the fields of cancer biology and therapy since disarrangement of this signaling network plays a major role in the loss of normal growth arrest and dedifferentiation seen in cancer biology. Endogenous negative regulation of ErbB-receptor signaling might be of benefit in cancer therapy.

[0057] NRG and its related ErbB receptors influence the growth and maturation of immature oligodendrocytes, and maturation is disordered when a full complement of protein and receptor are not available. Damage to, or aberrant maturation of, developing oligodendrocytes can be a pathogenetic factor in diffuse perinatal WMD. In one embodiment of the invention, a method is disclosed to prevent WMD and its consequences comprising delivering NRG to the developing neuronal cells.

[0058] NRG can be coupled to a carrier to direct delivery to the tissue to be targeted (e.g., brain, lung). In some embodiments, the active agent, NRG, must traverse the blood-brain barrier. A hydrogen bonding unit can be conjugated to the NRG, such as to create an increased affinity with a receptor. For example, an Ant or Tat peptide can be a NRG conjugate.

### IV. Perinatal Brain Injury

[0059] Perinatal brain injury, especially in the preterm neonate, is likely to have multiple causes, such as exposure to infection/inflammation, hypoxia-ischemia, and excitotoxicity. For example, an prenatal infection can elicit a maternal/fetal inflammatory response, which either directly damages the developing brain (i.e., via cytokine-induced damage and/or leading to damage by sensitizing the developing brain to subsequent hits, such as a second inflammatory challenge, hypoxia-ischemia, or free radical attack.). In one aspect, the invention provides a method of reducing risk of perinatal brain damage through the administration and/or increased production of NRG. In one embodiment, NRG can reduce inflammation and/or oxidation-induced brain damage.

[0060] The invention is based on the discovery that NRG signaling can reduce perinatal brain damage. NRG-ErbB-signaling system intersects with inflammatory mechanisms. In addition, differential ErbB-heterodimerization patterns were observed in lung type-II cells in pro-inflammatory versus anti-inflammatory contexts. In the brain, the neuroprotective effect of NRG exposure prior to middle cerebral artery occlusion is accompanied by a prominent reduction in microglia activation and interleukin-1 mRNA expression in the penumbra, indicating a downregulation of peri-infarct inflammation by NRG. In one aspect, the invention provides a method of reducing inflammation and/or oxidation in the brain. NRG has anti-inflammatory and anti-oxidative properties in the brain. Recombinant human NRG can attenuate the production of super-oxide and nitrite by stimulating N9 microglial cells.

[0061] Nuclear factor KB (NF-κB) is a nuclear component of the cell's inflammatory response. NF-κB-inducing kinase (NIK) is one component of the signaling cascade initiated by pro-inflammatory cytokines such as tumor necrosis factor-α, lymphotoxin-β, and interleukin-1, but is only required for lymphotoxin-β signaling. NIK is recruited to all four ErbB-receptors and can activate NF-κB in wild-type, but not in NIK-deficient cells. On the other hand, NF-κB is not the predominant signal in white matter inflammation induced by lipopolysaccharide.

[0062] Three days after permanent middle cerebral artery occlusion (MCAO), neuregulin is found to be prominently expressed in neurons of the penumbra. In adult rat brain, ErbB4 (but not ErbB2 and ErbB3) protein is upregulated in neurons and macrophages/microglia in ischemic areas after MCAO. A single intravascular injection of NRG-1β (approximately 2.5 ng/kg) can reduce cortical infarct volume by >98% when given immediately before MCAO. Thus, the induction of ErbB receptors can be an adaptive response to prevent neuronal injury. The invention discloses that brain damage can be reduced and/or ameliorated in the developing brain following administration of NRG.

[0063] Some perinatal brain damage can be attributed to excitotoxicity. In models of excitotoxic brain damage, ibotenate injection leads to neuronal loss and porencephalic cysts by acting as a glutamate analogue on the NMDA receptor. In cerebellar granule cells from 9-day-old mice, NRG upregulates the expression of the NR2C-subunit of NMDA receptors, which appears to be associated with an increased resistance of neurons to the adverse effects of neurotoxicity.

[0064] At least part of NRG's purported role in the etiology of schizophrenia might be due to a link between NRG/ErbB and glutamate/NMDA signaling. In addition, NRG-1β appears to play a glutamate-dependent role in memory. Rats, when exposed to 5 weeks of learning to navigate a maze, show increased brain expression of NRG-1β, but not if they also receive the glutamate blocker MK-801.

[0065] In one aspect, the invention provides a method of reducing brain damage in neonates through the stabilization of ErbB-receptor expression. The inventions shows that the NRG/ErbB signaling is protective during brain development. In some embodiments, the invention provides for antenatal administration of NRG. In other embodiments, NRG can be co-administrated with other endogenous protector, such as glucocorticoids, to reduce the incidence of neonatal brain damage.

[0066] In another aspect, a prophylactic method can be provided to protect the subject's brain against perinatal inflammatory, hypoxic-ischemic, and/or excitotoxic insults through direct NRG administration. NRG can enter the brain after intravenous, intra-arterial, intraperitoneal and intraamniotic administration. In experimental autoimmune encephalitis (one laboratory model for multiple sclerosis), systemic treatment with NRG reduces demyelination and enhances remyelination. This effect might not be due to NRG acting directly on oligodendroglia, but via induction of an environment more favorable to remyelination, possibly through modulation of the immune response. Such an environment can help the perinatal brain survive preterm birth without sustaining long-term damage.

[0067] In one aspect, the invention provides a method of administration of NRG for exogenous indirect or direct neuroprotective intervention. NRG and its receptors play key roles in brain development and damage. The invention recognizes that regulation of the NRG/ErbB system can modulate perinatal brain development. In addition, the importance of the NRG/ErbB system in the perinatal setting is supported by the findings that there is enhanced fetal lung surfactant synthesis by NRG-1β, and that all 4 ErbB receptors are present at the fetal endothelium as early as 24 weeks gestation. Thus, NRG can act as an endogenous protector in the perinatal brain and other organs (e.g. lung, eye, and gut).

### V. Evaluating NRG Expression and Activation of ErbB Receptors

[0068] Several NRG isoforms exist, all produced by alternative splicing of the same region on human chromosome 8p22 and all containing an EGF-like domain. For example, one of these isoforms, NRG-1β, appears to help signal the onset of surfactant synthesis in the fetal lung and can provide a protective function in experimental brain ischemia and several adult neurologic diseases. In addition, administration of NRG-1 has been shown to reduce ischemic cortical damage following transient middle cerebral artery occlusion in adult rats. Thus one aspect of the disclosed invention is directed to determining the expression level of NRG isoforms available in the cells of interest, for example NRG-1β.

[0069] Methods of assessing expression levels of NRG in a subject are known by those skilled in the art. Expressed NRG or fragments or derivatives thereof can be isolated and purified from a sample from a subject by known methods. The sample can be cells of interest or cellfree material (e.g. supernatant of cells, urine, liquor, or amniotic fluid) that can comprise but are not limited to fetal cells, umbilical cord cells, neuronal cells, blood cells, lung cells, endothelial cells and any other NRG expressing cell type. In addition, the samples can be obtained by those experienced in the art, including but not limited to, biopsying a fetus, obtaining fetal cells while in a pregnant subject, biopsying a neonate, flushing umbilical cord endothelial cells, chorionic villi sampling or cell harvest from the amionic cavity. Nonlimiting examples of methods to assess expression levels quantitatively or qualitatively can comprise, quantitative real time polymerase chain reaction (qRT-PCR), northern blotting, western blotting, enzyme-linked immunosorbent assay (ELISA), confocal microscopy, immunohistochemistry, protein arrays and flow cytometry. Quantitative or non quantitative PCR can also be used to amplify desired nucleic acid sequences of NRG from a genomic, cDNA or RNA library. Isolated oligonucleotide primers representing known NRG coding or noncoding sequences can be used as primers in the PCR. The synthetic oligonucleotides can be utilized as primers to amplify by PCR sequences from ribonucleic acid (RNA) (icon/nucleic acid (DNA), or more preferably a cDNA library, to analyze expression levels.

[0070] Genetic polymorphisms within the NRG genetic locus can also be associated with altered expression levels of NRG transcript or protein. For example both immature and mature cells with at least one SNP8NRG221533 allele, a single nucleotide polymorphism within the NRG genetic locus, have been shown to be capable of producing variant levels of NRG-1β depending on the nucleotide present in the polymorphism. In addition, schizophrenic samples have shown altered NRG-ErbB activation levels depending on the SNP present in NRG-1. Thus in one aspect of the invention, subjects can be screened for single nucleotide polymorphisms (SNPs) within the NRG gene locus and depending on the level of NRG expression a prediction can be made whether the subject is at risk for developing a neurological disorder. Methods of screening polymorphisms are well know in the art and can be used to determine the polymorphism genotype of the subject. Non-limiting examples can comprise: DNA or RNA sequence analysis, PCR, restriction fragment length polymorphisms, restriction site polymorphisms, protein sequence analysis, ELISA and any combination thereof. In another embodiment, subjects carrying predetermined polymorphisms (e.g., SNP8NRG221533) can be assessed for NRG gene expression levels. Neuregulin and the corresponding SNPs within the gene can be isolated and purified by known methods and expression levels of NRG in a subject can be determined using any of a variety of assays known to those skilled in the art.

[0071] In another embodiment, polymorphisms in the genetic locus encoding for ErbB receptor family members can influence the activation of neuregulin signaling pathways. ErbB receptor polymorphisms can also result in abnormally low levels of activation of neuregulin signaling and can lead to perinatal morbidity despite normal expression levels of NRG. Thus, screening for SNPs in the ErbB receptor genetic locus can also be a predictor for infants prone to long term disability. Methods similar to those used to assess expression levels of NRG can also be used to measure ErbB receptor expression levels. In addition, methods to evaluate activation of ErbB receptors in response to NRG are also well known in the art and can include, but are not limited to: quantitative real time polymerase chain reaction (qRT-PCR), Southern blotting, northern blotting, western blotting, enzyme-linked immunosorbent assay (ELISA), confocal microscopy, immunohistochemistry, protein arrays and flow cytometry.

[0072] Levels of neuregulin expression and pathway activation in a subject can be compared to one or more other subjects with a similar age range, gender, genotype, species etc. or can be compared to one or more other subjects of a different age, gender, race, genotype, species etc. to determine qualitative expression differences. In addition, levels of neuregulin expression and activation of ErbB receptors can be measured over a time range for a subject to determine fluctuations of expression and activation over extended time periods. The time range can be measured in days, weeks, months or years. In one embodiment, neuregulin expression levels can be measured by assessing transcript levels in a subject. In another embodiment, neuregulin protein levels can be measured. In yet another embodiment, neuregulin activation of ErbB receptors can be measured. Additionally, polymorphisms can be compared in a subject and neuregulin levels can be compared between one or more other subjects displaying the same polymorphisms or lacking the polymorphisms.

[0073] In one aspect of the invention, subjects with reduced levels or deficient in neuregulin can be supplemented with neuregulin. In another embodiment, subjects with reduced levels or deficient in activation of neuregulin associated signaling pathways can be supplemented with neuregulin. In preferred embodiments, subjects with reduced levels of neuregulin expression can be supplemented with neuregulin to reduce or protect against disorders associated with neuronal cell damage. Methods for treating neuregulin deficiency or deficit are further delineated in Section VII.

### VI. Screening Assays for Biologically Active NRG

[0074] The ability of NRG to produce a neuroprotective effect in a subject can be determined using any of a variety of known assays. For example, the ability of NRG to prevent cell damage, death, and/or function after an injury, e.g., an hypoxic/ischemic injury, can be determined histologically (e.g., by assaying tissue loss, immature oligodendrocyte loss, or myelin basic protein (MBP) expression as set forth in the examples below). In addition, binding assays can be used to determine the affinity between NRG and ErbB receptors. For example, kinase assays can be used to determine the binding and activation of ErbB3 or ErbB4 protein kinases when exposed to NRG. In addition, an experimental model for inflammatory processes, like a lipopolysaccharide (LPS) challenge of different type of cells, e.g., 3T3 fibroblasts and neural cells, as well as in vivo animal models (intra tecthal, intraperitoneal, intravasal, and intraamniotic injection) can be used to determine if NRG has a cytoprotective effect. This effect can be accompanied by corresponding changes of apoptotic markers and inflammatory markers, monitored by staining western blots with antibodies against PARP-1 and Cox-2.

[0075] Other tests that can be used to determine the ability of NRG to produce a neuroprotective effect in a subject comprise standard tests of neurological function in human subjects or in animal models of brain injury such as memory tests (e.g., Morris water maze, T maze, spontaneous alternation test, and bar-pressing task); locomotor activity (e.g., vertical movements, sniffing, grooming, coordination, and spontaneous locomotor activity); exploratory activity (e.g., novel large cage test); anxiety (e.g., freezing test, hole-board test, elevated plus maze, forced swimming test); nociception (e.g., hot plate test); feeding motivation; and aggressive behavior. Examples of such tests can be found in, for example, Miyachi et al. (1994) Neurosci. Lett. 175:92-94; Vaillend et al. (1995) Behay. Genet. 25:569-579; Fiore et al. (1996) Exp. Parasitol. 83:46-54; Valentinuzzi et al. (1998) Learning & Memory 5:391-403; Andreatini et al. (1999) Braz. J. Med. Biol. Res. 32:1121-1126; Crabbe et al. (1999) Science 284:1670-1672; Rao et al. (1999) Psychopharm. 144:61-66; and U.S. Pat. No. 5,447,939 (1995).

### VII. Pharmaceutical Compositions

[0076] The invention contemplates delivering the therapeutic agent, i.e., NRG, to the pregnant mother so as to indirectly deliver it to the fetus. In other embodiments, the therapeutic agent can be administered directly to the fetus, or to the neonate. The pharmaceutical composition used can be chosen based on whether direct or indirect delivery is selected.

[0077] As described in detail below, the pharmaceutical compositions comprising a composition of the invention (e.g., NRG) can be formulated for administration in solid or liquid form, including those adapted for the following: (1) oral administration, for example, drenches (aqueous or non-aqueous solutions or suspensions), tablets, boluses, powders, granules, pastes; (2) parenteral administration, for example, by subcutaneous, intramuscular or intravenous injection as, for example, a sterile solution or suspension; (3) topical application, for example, as a cream, ointment or spray applied to the skin; (4) intravaginally or intrarectally, for example, as a pessary, cream, foam, or suppository; or (5) aerosol, for example, as an aqueous aerosol, liposomal preparation or solid particles containing the compound.

[0078] Pharmaceutical compositions and packaged formulations comprising a composition of the invention (e.g., NRG) and a pharmaceutically acceptable carrier are also provided by the invention. In the method of the invention, NRG can be administered in a pharmaceutically acceptable formulation. Such pharmaceutically acceptable formulation typically comprises NRG as well as a pharmaceutically acceptable carriers) and/or excipient(s). As used herein, “pharmaceutically acceptable carrier” comprises any and all solvents, dispersion media, coatings, antibacterial and anti fungal agents, isotonic and absorption delaying agents, and the like that are physiologically compatible. Excipients comprise pharmaceutically acceptable stabilizers and disintegrants. The present invention pertains to any pharmaceutically acceptable formulations, comprising synthetic or natural polymers in the form of macromolecular complexes, nanocapsules, microspheres, or beads, and lipid-based formulations including oil-in-water emulsions, micelles, mixed micelles, synthetic membrane vesicles, and resealed erythrocytes. Supplementary active compounds can also be incorporated into the compositions.

[0079] The phrase “pharmaceutically acceptable carrier” as used herein means a pharmaceutically acceptable material, composition or vehicle, such as a liquid or solid filler, diluent, excipient, solvent or encapsulating material, involved in carrying or transporting the antimicrobial agents or compounds of the invention from one organ, or portion of the body, to another organ, or portion of the body without affecting its biological effect. Each carrier should be “acceptable” in the sense of being compatible with the other ingredients of the composition and not injurious to the subject. Some examples of materials which can serve as pharmaceutically acceptable carriers comprise: (1) sugars, such as lactose, glucose and sucrose; (2) starches, such as corn starch and potato starch; (3) cellulose, and its derivatives, such as sodium carboxymethyl cellulose, ethyl cellulose and cellulose acetate; (4) powdered tragacanth; (5) malt; (6) gelatin; (7) talc; (8) excipients, such as cocoa butter and suppository waxes; (9) oils, such as peanut oil, cottonseed oil, safflower oil, sesame oil, olive oil, corn oil and soybean oil; (10) glycols, such as propylene glycol; (11) polyols, such as glycerin, sorbitol, mannitol and polyethylene glycol; (12) esters, such as ethyl oleate and ethyl laurate; (13) agar; (14) buffering agents, such as magnesium hydroxide and aluminum hydroxide; (15) alginic acid; (16) pyrogen-free water; (17) isotonic saline; (18) Ringer's solution; (19) ethyl alcohol; (20) phosphate buffer solutions; and (21) other non-toxic compatible substances employed in pharmaceutical compositions. Proper fluidity can be maintained, for example, by the use of coating materials, such as lecithin, by the maintenance of the required particle size in the case of dispersions, and by the use of surfactants.

[0080] These compositions can also contain adjuvants such as preservatives, wetting agents, emulsifying agents and dispersing agents. Prevention of the action of microorganisms can be ensured by the inclusion of various antibacterial and antifungal agents, for example, paraben, chlorobutanol, phenol sorbic acid, and the like. It can also be desirable to comprise isotonic agents, such as sugars, sodium chloride, and the like into the compositions. In addition, prolonged absorption of the injectable pharmaceutical form can be brought about by the inclusion of agents which delay absorption such as aluminum monostearate and gelatin.

[0081] A pharmaceutical composition of the invention can be formulated to be compatible with its intended route of administration. Examples of routes of administration comprise parenteral, intravenous, intradermal, subcutaneous, oral (e.g., inhalation), transdermal (e.g., topical), transmucosal, and rectal administration. Preferably, the route of administration can be oral. Solutions or suspensions used for parenteral, intradermal, or subcutaneous application can comprise the following components: a sterile diluent such as water for injection, saline solution, fixed oils, polyethylene glycols, glycerine, propylene glycol or other synthetic solvents; antibacterial agents such as benzyl alcohol or methyl parabens; antioxidants such as ascorbic acid or sodium bisulfite; chelating agents such as ethylenediaminetetraacetic acid; buffers such as acetates, citrates or phosphates and agents for the adjustment of tonicity such as sodium chloride or dextrose. pH can be adjusted with acids or bases, such as hydrochloric acid or sodium hydroxide. The parenteral preparation can be enclosed in ampoules, disposable syringes or multiple dose vials made of glass or plastic.

[0082] Pharmaceutical compositions suitable for injectable use comprise sterile aqueous solutions (where water soluble) or dispersions and sterile powders for the extemporaneous preparation of sterile injectable solutions or dispersion. For intravenous administration, suitable carriers comprise physiological saline, bacteriostatic water, Cremophor EL™ (BASF, Parsippany, N.J.) or phosphate buffered saline (PBS). In all cases, the composition must be sterile. The composition can also be fluid to the extent that easy syringability exists. It must be stable under the conditions of manufacture and storage and must be preserved against the contaminating action of microorganisms such as bacteria and fungi. The carrier can be a solvent or dispersion medium containing, for example, water, ethanol, polyol (for example, glycerol, propylene glycol, and liquid polyetheylene glycol, and the like), and suitable mixtures thereof. The proper fluidity can be maintained, for example, by the use of a coating such as lecithin, by the maintenance of the required particle size in the case of dispersion and by the use of surfactants. Prevention of the action of microorganisms can be achieved by various antibacterial and antifungal agents, for example, parabens, chlorobutanol, phenol, ascorbic acid, thimerosal, and the like. In many cases, it will be preferable to comprise isotonic agents, for example, sugars, polyalcohols such as manitol, sorbitol, sodium chloride in the composition. Prolonged absorption of the injectable compositions can be brought about by including in the composition an agent which delays absorption, for example, aluminum monostearate and gelatin.

[0083] Sterile injectable solutions can be prepared by incorporating the active compound (e.g., a NRG) in the required amount in an appropriate solvent with one or a combination of ingredients enumerated above, as required, followed by filtered sterilization. Generally, dispersions are prepared by incorporating the active compound into a sterile vehicle which contains a basic dispersion medium and the required other ingredients from those enumerated above. In the case of sterile powders for the preparation of sterile injectable solutions, the preferred methods of preparation can be vacuum drying and freeze-drying which yields a powder of the active ingredient plus any additional desired ingredient from a previously sterile-filtered solution thereof.

[0084] Oral compositions generally comprise an inert diluent or an edible carrier. They can be enclosed in gelatin capsules or compressed into tablets. For the purpose of oral therapeutic administration, the active compound can be incorporated with excipients and used in the form of tablets, troches, or capsules. Oral compositions can also be prepared using a fluid carrier for use as a mouthwash, wherein the compound in the fluid carrier can be applied orally and swished and expectorated or swallowed. Pharmaceutically compatible binding agents, and/or adjuvant materials can be comprised as part of the composition. The tablets, pills, capsules, troches and the like can contain any of the following ingredients, or compounds of a similar nature: a binder such as microcrystalline cellulose, gum tragacanth or gelatin; an excipient such as starch orlactose, a disintegrating agent such as alginic acid, Primogel, or corn starch; a lubricant such as magnesium stearate or Sterotes; a glidant such as colloidal silicon dioxide; a sweetening agent such as sucrose or saccharin; or a flavoring agent such as peppermint, methyl salicylate, or orange flavoring.

[0085] For administration by inhalation, the compounds can be delivered in the form of an aerosol spray from pressured container or dispenser which contains a suitable propellant, e.g., a gas such as carbon dioxide, or a nebulizer.

[0086] Systemic administration can also be by transmucosal or transdermal means. For transmucosal or transdermal administration, penetrants appropriate to the barrier to be permeated can be used in the formulation. Such penetrants are generally known in the art, and for transmucosal administration comprise, for example, detergents, bile salts, and fusidic acid derivatives. Transmucosal administration can be accomplished through the use of nasal sprays or suppositories. For transdermal administration, the active compounds can be formulated into ointments, salves, gels, or creams as generally known in the art.

[0087] The compounds can also be prepared in the form of suppositories (e.g., with conventional suppository bases such as cocoa butter and other glycerides) or retention enemas for rectal delivery.

[0088] In one embodiment, the active compounds are prepared with carriers that can protect the compound against rapid elimination from the body, such as a controlled release formulation, including implants and microencapsulated delivery systems. Biodegradable, biocompatible polymers can be used, such as ethylene vinyl acetate, polyanhydrides, polyglycolic acid, collagen, polyorthoesters, and polylactic acid. Methods for preparation of such formulations are apparent to those skilled in the art. The materials can also be obtained commercially from Alza Corporation and Nova Pharmaceuticals, Inc. Liposomal suspensions (including liposomes targeted to infected cells with monoclonal antibodies to viral antigens) can also be used as pharmaceutically acceptable carriers. These can be prepared according to methods known to those skilled in the art, for example, as described in U.S. Pat. No. 4,522,811.

[0089] It can be especially advantageous to formulate oral or parenteral compositions in dosage unit form for ease of administration and uniformity of dosage. Dosage unit form as used herein refers to physically discrete units suited as unitary dosages for the subject to be treated; each unit containing a predetermined quantity of active compound calculated to produce the desired therapeutic effect in association with the required pharmaceutical carrier. The specification for the dosage unit forms of the invention are dictated by and directly dependent on the unique characteristics of the active compound and the particular therapeutic effect to be achieved, and the limitations inherent in the art of compounding such an active compound for the treatment of individuals.

[0090] The pharmaceutical formulation, used in the method of the invention, contains a therapeutically effective amount of the NRG. A “therapeutically effective amount” refers to an amount effective, at dosages and for periods of time necessary, to achieve the desired result. A therapeutically effective amount of the NRG can vary according to factors such as the disease state, age, and weight of the subject, and the ability of NRG (alone or in combination with one or more other agents) to elicit a desired response in the subject. Dosage regimens can be adjusted to provide the optimum therapeutic response. A therapeutically effective amount can also be one in which any toxic or detrimental effects of the NRG are outweighed by the therapeutically beneficial effects. A non-limiting dosage range (i.e., an effective dosage) can be from about 0.001 to 30 mg/kg body weight, preferably about 0.01 to 25 mg/kg body weight, more preferably about 0.1 to 20 mg/kg body weight, and even more preferably about 1 to 10 mg/kg, 2 to 9 mg/kg, 3 to 8 mg/kg, 4 to 7 mg/kg, or 5 to 6 mg/kg body weight.

[0091] For humans, the active dose of NRG to protect against brain damage in neonates can generally be in the range of from about 0.001 mg to about 200 mg per kg. However, it is evident to one of skill in the art that dosages can be determined by the attending physician, according to the method of administration, patient's age, weight, counter indications and the like. Administration of therapeutically effective amounts of NRG as used herein can encompass oral, parenteral, intravenous, intramuscular, sub-cutaneous, transdermal, intratechal, rectal and intra-nasal administration.

[0092] Administration of cells and other treatments can be carried out by various methods, and the methods need not be the same for each component. Generally, the molecule can be administered by any known route of administration, including intravenously, orally, or intracerebrally (e.g., intraventricularly, intrathecally, or intracisternally, or directly into the brain). The dose can vary depending on the method of administration. Doses determined in rats are typically scaled up for human treatments. The scaling to be used depends upon the method of delivery. If the molecule is to be delivered systemically (e.g. orally or intravenously) then the scaling is by body weight, where a typical rat weighs 300 grams and a typical human weighs 70 kg. If the compound is to be delivered to the cerebrospinal fluid (e.g. intracisternal, intraventricular), scaling is by brain surface area. A typical rat brain has a surface area of 1 cm², and a typical human brain has a surface area of 1000-10,000 cm², depending upon whether all of the various folds buried in convolutions are counted or not. If the compound is to be delivered to the brain tissue, scaling is done by brain mass. A typical rat has a 2 g brain, while the typical human brain is 2 kg. Thus, if a single treatment of 0.5 μg given intracisternally is effective in a rat, an intracisternal injection of 0.5 mg would be effective in a human patient. Of course exact dosages can be adjusted according to the weight of the patient and other criteria. It is anticipated that effective dosage for all three general routes of administration can range from 0.001-1000 mg total for administration to spinal fluid or brain tissue. In preferred embodiments, the dosage can be in a range from 0.001-200 mg, 0.01-100 mg, 0.1-10 mg or 0.5-5 mg.

[0093] Compounds can be administered in a single dose or they can be distributed in a series of smaller doses. For example, intracisternal administration can consist of a single injection given, for example, six hours after an injury, a pair of injections, given, for example, 24 and 48 hours after an injury, or, if necessary, a series of injections of, for example, 0.1 mg/injection, or a 1 mg injection, given biweekly (for example, every 34 days) in a treatment regimen that occurs at least six hours following the ischemic episode. The treatment regimen can last a number of weeks. For example, treatment can be given to a pregnant female at the beginning of pregnancy and continued throughout the gestation period.

[0094] It is to be noted that dosage values can vary with the severity of the condition to be alleviated. It is to be further understood that for any particular subject, specific dosage regimens can be adjusted over time according to the individual need and the professional judgment of the person administering or supervising the administration of NRG and that dosage ranges set forth herein are exemplary only and are not intended to limit the scope or practice of the claimed invention.

[0095] The invention, in another embodiment, provides a pharmaceutical composition consisting essentially of NRG and a pharmaceutically acceptable carrier, as well as methods of use thereof to modulate disorders associated with neuronal cell death e.g., PVL, mental retardation, neonatal stroke, cerebral palsy, fetal gray matter injury, and/or fetal white matter injury with the composition. In one embodiment, the pharmaceutical composition of the invention can be provided as a packaged formulation. The packaged formulation can comprise a pharmaceutical composition of the invention in a container and printed instructions for administration of the composition for treating a subject having a disorder associated with neuronal cell damage. The instructions can comprise directions for the treatment of adults and/or children. Preferably, the instructions comprise directions for the treatment of neonates. In another preferred embodiment, the instructions comprise directions for the treatment of a fetus via the administration of the composition to the pregnant mother. The pharmaceutical compositions can be comprised in a container, pack, or dispenser together with instructions for administration.

[0096] One skilled in the art will appreciate further features and advantages of the invention based on the above-described embodiments. Accordingly, the invention is not to be limited by what has been particularly shown and described, nor by the examples set forth below, except as indicated by the appended claims. All publications and references cited herein are expressly incorporated herein by reference in their entirety.

### EXAMPLES

[0097] This invention is further illustrated by the following examples which should not be construed as limiting. The following experiments were performed to demonstrate various aspects of the invention.

### Example 1

### Materials

[0098] Human NRG-1β1 (amino acids 176-246) and NRG-1α2 (amino acids 177-241) epidermal growth factor (EGF)-like domain peptides (R & D Systems, Minneapolis, MC), and recombinant human NRG-1 protein (GenWay Biotech, Inc., San Diego, Calif.) can be stabilized in 0.1% BSA. NRG-1b was expressed and purified as previously described (Carraway K L, et al. Nature 1997, 387: 512-516, and Crovello C S, et al. J Biol Chem 1998, 273:26954-26961).

### Example 2

### Neuroprotective Effect of NRG in Cerebral Ischemia

[0099] LPS challenge of 3T3 fibroblasts, A 549 cells, V56 embryonic stem cells and neurally differentiated V56 embryonic stem cells were performed by exposing cells to 100 ng/ml lipopolysaccharide (LPS, E. coli 0111:B4 LPS from Sigma) for 60 min in the presence or absence of NRG and related compounds. Cell pellets were further investigated by Western blot staining with anti Cox-2 and anti iNOS antibodies of 1D polyacrylamide gels.

[0100] Three different functional models: induction of chemical ischemia, induction of excitotoxic cell death by 100 μM NMDA (or 100 μM HCA) and induction of neuronal death by 10 μM α-amyloidl-40 (Bachem, Germany). All three challenges induced an initial calcium overload, which obviously initiated proapoptotic and proinflammatory events, leading eventually to neuronal dysfunction and cell death. Western blots of cellular fractions with or without NRG application were evaluated and showed increased levels of apoptotic marker PARP-1 and inflammatory marker Cox-2.

### Example 3

### In Vitro Testing of NRG and Neuroprotective Effects

[0101] Endothelial cells were harvested from human umbilical cord vessels within 1-5 days of delivery. Briefly, umbilical veins and arteries were cannulated with blunt needles, rinsed with sterile PBS buffer, and type I collagenase (0.04%, GIBCO, Invitrogen) was installed for 25 minutes at 37° C. Cell-collagenase suspension were collected and centrifuged at 250×g for 5 minutes at 4° C. Cells were resuspended, and plated in endothelial cell growth medium containing 10% fetal calf serum. Cells were washed after 2-3 hours of adherence, new medium was added, and cells were grown to confluence. Umbilical cords with histologic evidence of inflammation (funisitis) were excluded to reduce the likelihood of obtaining biased results from activated endothelial cells. Umbilical cords were collected from babies born either earlier than 30 weeks gestation (preterm group) or after completion of the 37th week of gestation (mature group). We used cells up to the 5th passage for the experimental assays. Before treatment, cells were starved for two hours in Dulbecco's Modified Eagle's medium (DMEM) containing 0.1% FCS. Treatment was performed with 100 ng/ml LPS. Cells were treated for 1.5, 3, 6, 12 and 24 hours. Untreated controls were kept in culture in DMEM for the same duration.

[0102] HUVEC were grown on glass slides for 24 hours and starved in serum-free DMEM for 2 hours. Cells were either treated with LPS (100 ng/ml) for 30 min. or 24 hours at 37° C. or left in DMEM as a control for the same duration. Immunofluorescence was performed as previously described (45). Briefly, cells were fixed with 3% paraformaldehyde for 20 minutes followed by permeabilisation with 0.2% Triton X14 100 for 2 minutes. After 1 hour blocking in 10% normal goat serum, fixed cells were incubated with the specific primary NRG antibody (rabbit polyclonal IgG Neuregulin-Ab 2; Neo Markers) and a specific erbB4 receptor antibody (mouse monoclonal IgG erbB4 (C7); Santa Cruz) at room temperature for 1-2 hours. Cells were washed with PBS and incubated with the appropriate secondary antibody conjugated with Alexa488 or Alexa568. Subsequently cells were incubated in 4′,6-Diamidino-2-phenylindole dihydrochloride (DAPI) (Sigma) for 10 minutes. Cells were mounted in Gelvatol/DABCO and analyzed using a Leica TCS-SP2 confocal laser scanning microscope.

[0103] Our first result was that both immature and mature human umbilical venous endothelial cells (HUVECs) expressed NRG-1β. In non-stimulated (but serum-starved) cells, NRG-1β was diffusely expressed in the cytoplasm in both mature and immature HUVECs. Mature cells also showed remarkable NRG-1β enrichment within the cell membrane after 30 min of both serum starvation and LPS-treatment. With increasing duration of exposure to LPS, NRG-1β seemed to enrich in the nuclear region. In immature HUVECs, NRG-1β localization was more diffuse in and around the nuclear region with little membrane staining in the untreated cells. The localization in the cell membrane fully disappeared after LPS stimulation. With increasing duration of LPS-exposure, NRG-1β localization increased in the nucleus in immature cells. LPS-treatment appeared to amplify this effect with special enhancement in the nucleoli in both gestational ages.

[0104] Twenty-four hours of LPS-treatment led to an increase in NRG-1β protein expression in mature cells. We found that treated cells raised their expression to a mean of 233±23% (mean±SEM, N=2) of control cells, whereas immature cells significantly (p=0.03) reduced the NRG-1β protein expression down to 79±8% (mean±SEM, N=3) of control cells. Each assay was carried out in quadruplicates. NRG-1β concentrations in corresponding supernatants were increased after LPS exposure over controls in mature (167±50%, mean±SEM, N=2) and immature cells (144±5%, mean±SEM, N=3). In summary, our results suggest that NRG-1β is expressed and might even be systemically released by human umbilical endothelial cells in response to LPS challenge.

### Example 4

### In Vivo Testing of NRG and Neuroprotective Effects

[0105] A bioactive NRG conjugated with a lipophilic moiety and identified as having an enhanced capability of entering neural cells in culture can be tested for functionality in vivo in an animal model (e.g., in a mammal, such as in mouse or rat). For example, the NRG can be administered to an animal, and the NRG evaluated with respect to its biodistribution, e.g., is uptake into neural cells, its stability, and its ability to stabilize expression of a target gene, ErbB, in the neural cells.

[0106] NRG can be injected directly into a target region of the brain (e.g., into the cortex, the substantia nigra, the globus pallidus, the hippocampus, or the striatum), and after a period of time, the brain can be harvested and tissue slices examined for distribution of the agent. In such experiments using concomitant ibotenate injection as an excitotoxic damage initiator, NRG appears to exert protective effects in both the grey and white matter of the murine brain.

[0107] NRG can also be evaluated for its intracellular distribution. The evaluation can comprise determining whether NRG was taken up into the cell. The evaluation can also comprise determining the stability (e.g., the half-life) of NRG. Evaluation of NRG in vivo can be facilitated by use of a NRG conjugated to a traceable marker (e.g., a fluorescent marker such as Cy3, Cy5, FITC, rhodamine, or fluorescein; a radioactive label, such as ³²P, ³³P, or ³H; gold particles; or antigen particles for immunohistochemistry).

[0108] NRG conjugated to a lipophilic moiety can be evaluated with respect to its ability to up regulate target gene expression, e.g., ErbB3 or ErbB4. Levels of target gene expression in vivo can be measured, for example, by in situ hybridization, or by the isolation of RNA from tissue prior to and following exposure to NRG. Target RNA can be detected by any desired method, including but not limited to RT-PCR, northern blot, or RNAase protection assay. Alternatively, or additionally, target gene expression can be monitored by performing western blot analysis on tissue extracts treated with a NRG.

[0109] NRG conjugated to a lipophilic agent for enhanced uptake into neural cells, and/or NRG in a pharmaceutically acceptable carrier can be tested in a mouse model for infection/inflammation, hypoxia-ischemia, and excitotoxicity, neuronal cell damage, and/or neurological disease. For example, NRG can be tested in a mouse model of brain injury such as memory tests (e.g., Morris water maze, T maze, spontaneous alternation test, and bar-pressing task); locomotor activity (e.g., vertical movements, sniffing, grooming, coordination, and spontaneous locomotor activity); exploratory activity (e.g., novel large cage test); anxiety (e.g., freezing test, hole-board test, elevated plus maze, forced swimming test); nociception (e.g., hot plate test); feeding motivation; and aggressive behavior. Examples of such tests can be found in, for example, Miyachi et al. (1994) Neurosci. Lett. 175:92-94; Vaillend et al. (1995) Behay. Genet. 25:569-579; Fiore et al. (1996) Exp. Parasitol. 83:46-54; Valentinuzzi et al. (1998) Learning & Memory 5:391-403; Andreatini et al. (1999) Braz. J. Med. Biol. Res. 32:1121-1126; Crabbe et al. (1999) Science 284:1670-1672; Rao et al. (1999) Psychopharm. 144:61-66; and U.S. Pat. No. 5,447,939 (1995).

### Example 5

### Assessing Incidence of Polymorphisms in NRG-1β

[0110] We evaluated 54 small for gestation age children <32 weeks gestation from the Developmental Follow Up Program at Hannover Medical School (Germany). Children were at least two years of age. A comprehensive physical examination and the Denver developmental screening (DDST) II test were administered by one paediatrician. Clinical data were abstracted from medical charts. A whole blood sample was obtained for genetic analysis. We established SNP8NRG221533 genotypes by polymerase chain reaction (PCR) and restriction fragment length polymorphism (RFLP) analysis.

[0111] Endothelial cells were harvested from human umbilical cord vessels within 1-5 days of delivery. Briefly, umbilical veins and arteries were cannulated with blunt needles, rinsed with sterile PBS buffer, and type I collagenase (0.04%, GIBCO, Invitrogen) was installed for 25 minutes at 37° C. Cell-collagenase suspension was collected and centrifuged at 250×g for 5 minutes at 4° C. Cells were resuspended, and plated in endothelial cell growth medium containing 10% fetal calf serum. Cells were washed after 2-3 hours of adherence, new medium was added, and cells were grown to confluence. Umbilical cords with histologic evidence of inflammation (funisitis) were excluded to reduce the likelihood of obtaining biased results from activated endothelial cells. Umbilical cords were collected from babies born either earlier than 30 weeks gestation (preterm group) or after completion of the 37th week of gestation (mature group). We used cells up to the 5th passage for the experimental assays. Before treatment, cells were starved for two hours in Dulbecco's Modified Eagle's medium (DMEM) containing 0.1% FCS. Treatment was performed with 100 ng/ml LPS. Cells were treated for 1.5, 3, 6, 12 and 24 hours. Untreated controls were kept in culture in DMEM for the same duration.

[0112] Human umbilical venous endothelial cells (HUVEC) were grown on glass slides for 24 hours and starved in serum-free DMEM for 2 hours. Cells were either treated with LPS (100 ng/ml) for 30 min. or 24 hours at 37° C. or left in DMEM as a control for the same duration. Immunofluorescence was performed. Cells were fixed with 3% paraformaldehyde for 20 minutes followed by permeabilisation with 0.2% Triton X14 100 for 2 minutes. After 1 hour blocking in 10% normal goat serum, fixed cells were incubated with the specific primary NRG antibody (rabbit polyclonal IgG Neuregulin-Ab 2; Neo Markers) and a specific erbB4 receptor antibody (mouse monoclonal IgG erbB4 (C7); Santa Cruz) at room temperature for 1-2 hours. Cells were washed with PBS and incubated with the appropriate secondary antibody conjugated with Alexa488 or Alexa568. Subsequently cells were incubated in 4′,6-Diamidino-2-phenylindole dihydrochloride (DAPI) (Sigma) for 10 minutes. Cells were mounted in Gelvatol/DABCO and analyzed using a Leica TCS-SP2 confocal laser scanning microscope.

[0113] We genotyped both whole blood samples from the children of the pilot study and HUVECs obtained from those umbilical cords used for RNA-extraction, ELISA and confocal microscopy. Genomic DNA was isolated after an overnight incubation of the cells with proteinase K (Merck) using standard phenol-chloroform extraction. Polymerase chain reactions (PCR) were performed in a 20 μl volume including 100 ng of genomic DNA, 4 μl Q solution (Quiagen), 2 μl 10×PCR buffer (Amersham), 2 μl of each primer (5 mM) (5′ Primer 1) 5′-ACCTAAGATGTCCAAGAGACAG-3 (forward) (SEQ ID: 22) and (3′ Primer 1) 5′-GACTGGAAGCCATGTATCTTTATTGT-3′ (reverse, both from Invitrogen) (SEQ ID: 23), 1.2 μl dNTPs (2 mM each, Amersham), 1.2 μl MgCl2 (25 μM, Quiagen), 6 μl H2O, and 0.1 μl HotStart Taq DNA polymerase (5 U/μl, Qiagen). Thirty-six cycles were performed with 15 min denaturation at 95° C., 1 min annealing at 62° and 1 min extension at 72° C. The artificially introduced mismatch in the reverse primer allowed for a subsequent allelic discrimination by the restriction enzyme RsaI. PCR products were incubated with RsaI (New England BioLabs) at 37° C. overnight and restriction fragment length analysis (RFLP) was performed by 3% agarose gel electrophoresis.

[0114] All sample measurements were carried out in quadruplets. Cells were scraped, lysed by sonication (3×30 sec), lyophilized, and resuspended in 200 μl PBS before they were applied to Elisa wells. The amount of total protein was measured by a highconcentration microplate assay using a commercially available reagents kit (DC Protein Assay, Bio-Rad) following the manufacturer's protocol.

[0115] The Elisa was performed using the Human NRG-1-beta 1/HRG-1-beta 1 DuoSet (DY377 R&D Systems). Ninety-six well-plates were coated overnight with 100 μl capture antibody per well (4 mg/ml Heregulin Ab-1 Clone 7D5, Neomarkers) at 4° C. After overnightblocking with 1% protease-free BSA and 5% sucrose, 100 μl of sample or standard were incubated overnight at 4° C. 100 μl detection antibody (200 ng/ml Heregulin/Neuregulin Ab-2, biotin-labeled, Neomarkers), solved in PBS with 1% protease-free BSA and 2% normal goat serum was added for two hours. Fifty microliters of Streptavidin HRP in 10 ml diluent were distributed to the wells (100 μl per well) and incubated for 20 minutes in the dark. One hundred microliters of substrate solution per well was incubated for 20 minutes in the dark. Substrate reaction was stopped by adding 50 μl 2N H2SO4. Photometric extinction was measured by 450 nm vs 570 nm. NRG-concentration was calculated based on 1000 μg of total protein and presented as % of controls.

[0116] RNA isolation was performed by using a guanidinium-based cell lysis and subsequent extraction method with acidic phenol solution (ABgene). RNA yield and quality were measured photometrically and by agarose gel electrophoresis. One microgram of total RNA was subjected to reverse transcription using the First-Strand cDNA synthesis kit (Amersham Biosciences). Real-time PCR was performed using a commercially available primer assay for NRG-1 and a SYBR Green Master Mix (Quiagen) following the manufacturer's protocol with 40 cycles and an annealing at 60° C. β-actin served as the housekeeping gene and was amplified on the same plate using primers (5′ Primer 2) 5′-AGATGACCCAGATCATGTTTGAG-3′ (SEQ ID: 24) and (3′ Primer 2) 5′-GAGTCCATCACGATGCCAGTG-3′ (SEQ ID: 25). We calculated means and DCt values using the ABI PRISM 7000 SDS software (Applied Biosystems) for relative quantification. Corresponding control values were subtracted from treated samples to calculate DDCt values. A negative result indicates a higher NRG-1 gene expression in the treated sample compared to the respective untreated control.

[0117] Forty-two (77%) of 54 infants in our study had at least one C-allele (CC: N=6; CT: N=36; TT: N=12) (Table 1). Ten (19%) of all children had cPVL as clinical outcome, 5 (9%) had cerebral palsy, and 9 (17%) had developmental delay. Comparing the 42 children homo- or heterozygous for the C-allele with those who had a TT-genotype, these percentages were 17% (CC/CT) vs. 25% (TT) for cPVL, 5% (CC/CT) vs. 25% (TT) for CP, and 18% (CC/CT) vs. 33% (TT) for developmental delay, respectively. Among those homozygous for the C-allele, all morbidity outcomes were absent. The one-sided Cochran-Armitage test for trend was p=[CD14]0.02 for cerebral palsy and p=0.03 for developmental delay even in this small sample, confirming a compromising reduced risk in infants with any C-allele.

[0118] Among the 54 children born before 32 weeks of gestation in our study, 63% (N=34) were born before 30 weeks of gestation, 44% (N=24) were less than 1000 g in birth weight, and 22% (N=12) were small for gestational age (SGA)), i.e. birth weight below 10th percentile (27). Infant's sex was equally distributed in both groups. There were no significant associations between perinatal risk factors and SNP8NRG221533 genotype. However, infants carrying at least one C-allele were appreciably less likely to be born after preterm labor (60%) than those with two T-alleles (83%), and also slightly less likely to be male (45% vs 67%).

[0119] Low gestational age and birthweight were the strongest risk factors for all three morbidity outcomes, cPVL, cerebral palsy and developmental delay. Among the other perinatal variables, only chorioamnionitis and preterm labor appeared to be potential confounders of the observed relationship between SNP8NRG221533 genotype and outcomes by virtue of being associated with both, genotype and outcomes.

[0120] Additional analyses revealed that adjustment for the single potential confounders gestation <30 weeks, birth weight <1000 g, male gender, preterm labour or chorioamnionitis did not result in a reduction of the effect of the SNP8NRG221533 genotype on outcome observed in univariable analyses. Of note, we considered our dataset too small to adjust for more than one variable at a time.

[0121] We found support for a dose-response-relationship between the amount of NRG-1β expression and (1) maturity level of cells and (2) the presence of the C-allele of SNP8NRG221533. In preterm infants, the presence of at least one C-allele was associated with a reduced risk for adverse neurologic outcome.

[0122] While the present invention has been described in terms of specific methods, structures, and devices it is understood that variations and modifications will occur to those skilled in the art upon consideration of the present invention. For example, the methods discussed herein can be utilized beyond reducing or assessing risk of neuronal cell damage in some embodiments. As well, the features illustrated or described in connection with one embodiment can be combined with the features of other embodiments. Such modifications and variations are intended to be comprised within the scope of the present invention. Those skilled in the art will appreciate, or be able to ascertain using no more than routine experimentation, further features and advantages of the invention based on the above-described embodiments. Accordingly, the invention is not to be limited by what has been particularly shown and described, except as indicated by the appended claims.

[0123] All publications and references are herein expressly incorporated by reference in their entirety. All methods described herein can be performed in any suitable order unless otherwise indicated herein or otherwise clearly contradicted by context. The use of any and all examples, or exemplary language (e.g., “such as”) provided herein, is intended merely to better illuminate the invention and does not pose a limitation on the scope of the invention unless otherwise claimed. No language in the specification should be construed as indicating any non-claimed element as essential to the practice of the invention.

The application's sequence listing, which the Patent Office published only in electronic form, follows.

SEQUENCE LISTING (21 sequences)

SEQ ID NO: 1 - DNA, 1124806 bp, Homo sapiens
tttttttttttgcccttatacctcttcgcctttctgtggttccatccacttcttccccctcctcctcccataaacaactctcctacccctgcacccccaataaataaataaaaggaggagggcaaggggggaggaggaggagtggtgctgcgaggggaaggaaaagggaggcagcgcgagagagccgggcagagtccgaaccgacagccagaagcccgcacgcacctcgcaccatgagatggcgacgcgccccgcgccgctccgggcgtcccggcccccgggcccagcgccccggctccgccgcccgctcgtcgccgccgctgccgctgctgccactactgctgctgctggggaccgcggccctggcgccgggggcggcggccggcaacgaggcggctcccgcgggggcctcggtgtgctactcgtccccgcccagcgtgggatcggtgcaggagctagctcagcgcgccgcggtggtgatcgagggaaaggtgcacccgcagcggcggcagcagggggcactcgacaggaaggcggcggcggcggcgggcgaggcaggggcgtggggcggcgatcgcgagccgccagccgcgggcccacgggcgctggggccgcccgccgaggagccgctgctcgccgccaacgggaccgtgccctcttggcccaccgccccggtgcccagcgccggcgagcccggggaggaggcgccctatctggtgaaggtgcaccaggtgtgggcggtgaaagccgggggcttgaagaaggactcgctgctcaccgtgcgcctggggacctggggccaccccgccttcccctcctgcgggaggctcaaggaggacagcaggtacatcttcttcatggagcccgacgccaacagcaccagccgcgcgccggccgccttccgagcctctttcccccctctggagacgggccggaacctcaagaaggaggtcagccgggtgctgtgcaagcggtgcggtaagttcctcgcccttgggggcgcgaacccgcggcgaggagggcgcatcccgggcgcgcgggcagcggggctcgacggccgcccgagcaaggcagaggcgctctgggtcccagttgttggtttcagggtggtgggttctcagcgatcctcagagagggaggtttcgctttctccagcttcccttgtcttaggctttgccactggagaaagcccaagtttagtcctgggttggggcctcctgaaactttttaatcctttggggtttggctcaccaagtagatcggaaatgtgccggctgctttcttgtgggtgatatgaacttggctttggttaggagttgctgattctgggcctcctttgaaggaggaagggtgagtcccgcaggattttaacgccttcccttcacttggagtccagagtgtggagatggttaggggtttgcttctgtgtctgtgaagtctctgcaaggaaggggcagtgcactgacattccccgacagatgtggcagagttttttggcaactcaatgtccagcagagaggtgcagtctgtaccttgtgaatatgtgtaatatgtgagaattataaagttgttattggtgggggtttttttttttggccaagtcatctcaagaaattttgttttcacaatattttggtttggaggatgtttttgcacttcactgcatcagaacagatgaacgaaattatggaatatcacatgtaggccctgaagaagaagaattttggaagtttagcaattatttgctacaccttttcccacttaccactgaaaagtattcttcccgggtctgcttcatatgatcaggtttgagaaattagctgattatctcatttcgttgctgaggtagcattatgtttatgccattcataaactaatttctatgatctaaatatctgtataatttcctgattactatataatcactaacacatagcggggtttcttctcaaacagtaaattaacacgattacacatcacaaattccaacatgcataatagcttttccccctggtctttatgtatccgtctaatagacgtttgggttaattgaatttttataaaactcagcaccatgccaagcagagtctgcctgtgatggagagtgtgtcagttcttttaaatttgtgtctggtgggggccaattatttaaatttctggttggcatttgtggtggttaagtcctgctgttaattaatacctgatgatttggttttaatgacagcaaagatcattgttcacccaccattcccttatctgaacaatgtactttgtatgccagagacctgttaggattgcaccactcagtggacagaagctgttcagagagtggtgctgaagaaagctaagtggcatagggattccccgagacccactgatagatgtcactccaaagcatgggaaatgctctgctgggagctgtcttattaggcaaccgaaaagctcagcaccatcgtactgcagcatatgttactctgttacagaatctgaaacaaaaccttttaagcaacaccactgtccagttttcatatgttttatagtgtgtaattcaggaaggatttttcctttatcccaagtcatgagttttgaatcattcacaccacatggtgggaagttaatataaaggggattgtagttagctgtgatgcctaggattgggggtgcattactacattatcaattgtgttagttataccttttaactagaaataaatgtaagacttgagaggtaaagttcttacaagcatccagagaatgtttggaaatggaaaactcatgttgtttggaggaatcatattctattcttgtgcttctaaggggaaaaaacttcattgaaggtacttagttttgtccctcagtttgccagtcaaaagaaatataatacatagttgtaagttgtggcacgttttaaaaaaatgggtttttaatgagctggagatctttttgcatgtaatcgagtatgttaagaaatcacaaagttactgccctggatttctgtagctattgtgtgtgcttggcgatttttgtgttatatgatttaaagtaggatattgcttttaacctcaaatagatttagctaagttctaactgaaatcatgctaaaagtttctcctcgcatttttacaaacatagtgtttcttgtaaaactggaggataaaagcaaataatatcagctattttatatgatgtaaattcagtaaatctgcacttggaatattgagtgtaaaagtgtgtgtgtgtgtgtgtgtgagagagagaatgaatgaatgtgtgaattcatccagttgtgtggtgtcagataatgccattcagaatttgccaggcaaagaaacacagaaaaatggaaaagagagagagagagagaactagcaagaggaaagaatgagaatgagaatgggggctgatttgttctggttgagctgcttctggtcagaagatttcagggagagtgatggagcagaaggccctcacctaacatgaagctgccctgggggcgtgatggttgtgtgcaggcttgagccataatgctaggctggagaaggaatagagcaaagtcattttgtgatatcatacccaggggaacagtttccagctctgctgctctcagctgctgtgttgtttcctacaagttgtttgctagtgtagaaactacacatgcaacagattagccttagggttgagttaataaaaatctttcctcttgaaattcctttttctctttccccctcatctaatataaactccggaataatgtcgataaaacaagaagctctttgaaaaatggacctttggaaacagaaactatgagtgtattttagaagacaacatggaaattcatagcttaattgctttgtagttgaagtttgtataaatgacacttcctttacagttatttaaagtgtttgtagtcttcactttttctgttgctcactgaacgacctaagaaatatccttgggttttatgttcattggaatgcaggataatttgctgtccgattaaatctctattattcaaacaagtcattgtttgatgtgctacacttttagcttccaaagcattgtggttatatgaggcagaagctgatttccaaaaaggagtacaaacactgaggttgaataacatctacaattgggctatgccagatttgtacatcaattctgatcttacaagccaatataagtattttatatcatatgatggtagaatgaagatgtatacatgtatgcatgtattgataatgtaaacatctttatcaaatatttatgatacatagcacttgctctttttaatatcttcagtcactatttaataaagtgtgctaaccttatggtgttttgaaaatgaaagaaaatgctgcagagattttccagtcagcattaaagaaaactattcttaataaaagctatattaaggaaatagaaacagtaacagatatagcctgactgcttgtatgttgtaaatacacatgtaaatttaatttcccaagtgtttgtgactgctctttttaaactttataaatcttgctgtcaaaaatctataccggatttaaaatagctacttctactgagtagagaaactatgtatttatttatatgtatgttaaaaatgaaaccaacataggtcatttgggagaagaactccttagaataaaaatattttaaaaagtggatttaaatatctgagttagaatatttcactagcactaggggatcgttcttgttgttgtggggtatctataaatcctctgaatgtagggaaagtcttaccatatgtcctgatgtattaagtaagactaggagctttagacaacagagaattaaaacagtgagctgtacttcctctggcttgtatatttatagcaaatgagagcaaaagatgtgattgggcgggttattgcccttgtcaaatataatctattcattcttccggaaatctcctttgcttcgatacctattttcttcctgtttttttttcttaattataaacataatgtcttttacaaccctcttgtacatttcaatgacaatttatgaactgcttagatatccaaagatctctaaatcctcatagcaatacttagccttttatttgttttaaatatggttgaatgatctgaaaaaataatctcttttgatagctcttaatgaatgggtattttgattagctttgtatagataaatgataatgaaaacaaaaagtatacaattagggttcttactgattcaagcaatttgttaccaccccaaaatagtgcaacatggcttagtgaaagtcttcataagaaagtaaaaactaatttacaatgttcttatttcctaatcacagaaatgggcattgtggacagttttcaaccaatatatgaatactctaaatttgtgcatacatattgttactccgcttttatgttataacatgtaagttaaaattactattatgaaagaatatataacctggctagtttacccccaacctctccagaatatcagtcgctttatagtacttgaacgtttgcttagtgacacattctgttgaaatctaatgttgaattatttgtggatttacagaatatacaaattcacaaataattgtatgactaagacaaaacttggtcattttaagttgagggattgtcctagttgagaggttgtgttttcatattgcctaagttgttgagtgctgtagtgcacttcaagtaaatctgtttctgaagacttgccccctggattttcgtccctaaattatccatacaggttgaagcagataaaatacaagaaattttggtgaagttgaaggttaaaaatagattgactagtctcttcttggcatagatacaattattaggaaacagttctccctaatacagacttgccatccaggcatcctagagagagatgcatatgtggtaatttacattaatttttggtcttcttcaggagaaccaggatatttttccctacggaaaatagtttgttaggaagttctttcctggcccttgatttacctcatttggacctagtaaaatttatactttgttttaaattacaactaaaaaatcaaaaagaagaaatgttacctacagtctggatggaccgtaagagactgtcctactactttctaactcagacttctgtgttttttcttttcttcttctttatttcccctatgaagatactacaggggaagccttgggtaaatgatggggcccaggagtggattgtagtgtatgagtttaggattgctagtcattatcatatggactagccttctctcgaaaccttgaaattcagctgtccgggtccaaggaatgttggaaaatagaggtcttagatcacaagactgtgaatgcaaatggtctttctgtttctgatggagtctttgtccatcccatgaggacgtggatggtaacctgcattgcatctctagttcagaggctttctctccaaagcccaaggctctgtctttggacatctgccctggcttgctgggaacaagaaaacagctctgagtggtgcatgaatccggagctagtagccaggtttatgaggtagcaatggtccaagggaacctagaggagggaattgtttccttttcttttgctctgctgtgctagaatatgtgagctgaatcaagcccagtgcaagggaacatacctgatgagggcactagagtcttggtactgggtatacctaagagcccaggggatggacgagggataagaaatgtgaagtactgtcagcttcactaaatttggaaaatgcataccagtaatactatcatcccaaatggttgtcttttatctgggaattgccattaaggcaaagatagctaaaaaaattgagggcatactaaaaccacatagttataactaccacttatggagttggtaaatttttttggcctctttgatagacacatagagtttgatttttatgtgtagattaaattcctgttgaataattaatgaataaatgactgaaggaccccagctggttggatagtggaaatcactgttctagcctaaatttagaaagataaaaacatacttttgatttttttctcttctcatctctgatatggtgagtttgataccaggacactgttcccttctcttcccatccagagccttactgtaatctggatcgacctttggggcttcagagaaaggttgtttaatttcccaaaacttttccctcacttatttttagaacaatatttgttctgtgtagcttatagcccagcaggaaaaaaaaattccagtgttgtaaatgcttaaaagtacagaagagttttgctgtagtctatgaacccttaccactgttttcagcagaaccatttgtaaaccatcccagtttattttgggtgacagacttcagtattcagaaattttgtgttctccttggatctctcttcacaggtgtttaaccatctcagtactgtaagtgatactttatgttgaaattcattctcataactgaagatggaaaaacacagcttatatccctaagaagtaatacaaagaggttttagatcagttcctctttacttatttttcttgtttccaatatcacaacagctcttggtttacctgcaggtggggtggcatgtgcccatttgggctctgatgaataatgaggttctttgccttcacttcctcagtcggccctggaggcactgtgggagatgatgtgttatcagtgaagcagcagatgtggtggcagcattttcctccactgcagggagcatcccgtctgtacctctgtacagagcaggggagctgtctactgagaaggaaatggatggctgtgtttgcttcacatagaatttctcattagccttgggaagtggttctggcagttggggccccttggtggttgccaggatggagaggttctgctcagagtgggtgtgctcattgtcctgtcatctgcacaaagggccacagcattgagataacctaggcatgctgctgctttgcaagcccggacacctccggacaatcctttcctctgttgtcttcattcccatccatagagatgggtcacatcttgtcctcaggaacactagcacctttctttttgttggagcagaaattttataaaacaccctagcattttggaatatagttttattccgatgagcagtttagaaaaatttatggtaacataaaatttaccattttaaccatttttaggtgtgcagttcagtggcattaagtatttgcattgttgtgtaaccctcactgcaatccatctccagatattttatcttcccaaagtggaaactctgtattcattaaacactaactccccattccctttcctccttttccccaatcaccattctactttctgtctttacaaatttgactactctttttttttttttttttttttttttttgagacggagtttcgctctgtcgcccaggctggagtgctgtggcgcgatctcgactcactgcaagctccgcctcccgggttcacgccattctcctgcctcagcctcccgtgtagctgggactacaggcgcgcgccaccatgcccggctaatttttgtatttttagtagagacggggtttcaccgtgttagccaggatggtctagatctcctgaccttgtgatccgcccgtctcggcctcccaaagtgctgggattacaggcgtgagccaccgcgcccggccctacctttcttaagtgtagagttcagcagtattcaatacattcgtaatgttgtacaactatcaccatcatccatcgccatactcttgaccttgtaaaaccaagactctataccaattaaattacaacttctcattttctcctcccccagccactgacaaacactattctactgtttgcctctctgatttttactaagtgcatcatttaagtggaatcatatggtatttgtccttttgtgactggcttatttcacttaccataatgtcctcaaggttcatcatgttgtagcatatgtcagaatttccttcttttgaaaggctcaataattttccattgtatgtaaataacacattttgtttattcatccatccatccatcagtggacacctggtttactttcacattttggctattataaataatgctgctgtgaaatgtcttctcaaatccctgctttcaattttttgggtatatacacagaagcagaattgctgaaacatatggtaattcttttttctttttttcttttcttttttttttttttgagatggcatctcactgtgtcgcccaggctggagtgcagtggcacgatcttggctcactgcaacctccacctcctgagttcaagtgattctcctgcctcagcctcctgaatagctgggagtacaggtgcatgccaccatgcctaagttttgtatttttagtaaaaatggggtttcaccatgttggccaggcaggtcttgaactcctgacctcaggtgatccgcctgcctcggcctcccaaaatgctggattacaggagtgagccatggtgcccggcctcatatggtagttctaggtttgctttttggaggagctatcatactgttttccatagcagctgcaccattttacattcccaccagcagtaaacaagggttccagtttttccacatcctccctcacacatgctattttctactgttttgatactagccttcctaatgcacgtggagtagtggtgagcagtttttatattgttgttgttttctatacagagttagtgtctctaattacactgtcattaacaagaagcaaaagttctcagaaaagagaggtgttcatttattcaactcttagtttaaatagcatgtaagatcctgaatctgaaaccatgaaataaggaaattacaatggataacagcttaataaaaacaatgatttaaagagtaagcttagaaataaagaattgagtaagcttcgatttaaagaataagcttagaaataaaaacaatgaaagatgtaaagaataagcttagagaatggacttacagaaaacagtcctccaaggtcatcatgagaatattgtatttttattcatattgctatcagtgtagtccagaaaggaaccttatcatactttgattagtttcagaaccttttaattgatttaatgtattcattaattgcctctaccccagcaatttccctgtctgtattcctgtccattgccccaatccccttctaatcagtacgcaccagaggctgagtcattctaaaatactacttttttttttgtttgtttcagacagggtcttgctctgtcatccaggcgggagtgcagtgggacgatcttggctcactgcagcctcaacctcatggactcaagcagtcctccacttcagcctcccaagtagctggtatcacaggcccatgccactatgcccagctaatttttgtattttttgtagagatggggttttgccatgttgcccaggctggtcttgaactcctaagctcaagcaatgctcccacctcagcctcccaaagtgctgggattacaagcatgagccactgcacttggcctgaaatgctacttttcttaggccttgttccctacttagaaagtttcaatggatgcaccatagttaactcaagatctcaacattcaatatcctccttagcctcaataaagccttatctttctcaccttcccatatgaacacttcatccactctgactgctccctgaacaggccaggcactttcctaaccctcctgtttttacatatgccatttcctctgcctcgatcttcttccaccctcatttctacctgtggaatttctgttcttccttctagggacagctcaaatcctactgcttccataatgaaactagtaatgattcctaccagggatatgcactctagaatttgaacacagagctcctctttcctgtgtaccttacacaaggtactgttacaaattttccttctgtcatattgtgtttgttacaatgtatgtattttaaaatttttctctgtttctgtgtgtcttgcctcactggcagccaacactattcttgtgtttggatactagcagggtcttcagcttacttgccagtgaaaagtgccctggcctcgagtcagaagaatcctttccactttcagctttgtagttagtacctgtgtgattgtgggtcgctgactttattcactcatttgggtctcagtttcctaatatgcaaaacgagaaggtaaaatgcttttcaaggtccgtttaaactgtatttggtcctcagaaatgacccaaacatagaaatctccttcttctggagctttttctggagcttattttctcttcctctcctcttatttagtgttgttctcaggagaacacatgtgggaaaacaactgtgaaacttttagacactctaagagaggagaaagagagctgaatgagagggaaccttcaagggaaggtgtctcttttctccaaatcttatctccatggcctttttgtgtcatttaaaaaaatattaacagttatttgcattcgctggcatcgtcttttcaaaaagcaaatatgattgcctctgcaagcctgtctttgaaatgataaagtatgattaatccacagctgtattctttagaatgagaaagttcagtcatttgtggtgctaaaatgaaaaaataaagatttgaatggttttactatttactgtgaatttatttttacaatgtagatggggcattgttttaggttctaataattagcactgttgctgaaatggatgaggtcagcacagagagtgtggagagcttggttttcaggggggtggcagcagttctaatggctgcagggcgaggcttcctgctgagatgccagtgttgggttctttctcaaattatgatttttatggtttgggcaagaaaaggatgcatttaagctcttttataagtaaaatgagcaatgctgaaacagttgtcaaatgggaataatttgatctgacttttacaatttctgcatgaagaggtattggcagctccatggcattggggcaggatgggcagggcttagctgggctaggtccattttttttttccttcagtttaacgtctccgacccctggtggattcacctactgcagaagagccaatgctgcttataaattatgtttcctcaatctatatctctagcccagacctttctttttggctctctatctgaacatctaactacttacctggtaacttatgtcctacaaacactttatgtgaaatattttaaccagtgcctcatctccactgccagtccctctgcacatttgtatcctaataatgactctaccctcactgctagtatgatcaccacagttattcccagtgacttccttggtcgacacttatttggtgccagagtagtaggcgctgagataaattcagttaacccctcaccatatggcagcattaatattttttagttacctcaaaccagatacctctcctgctccataccagattagtgaccacatcccactgattctacgtccttaacaaatctcagattcgtcccgtcttccctcacttcaacttctctgtaatagattcttactgcaactgtaacagcctctttatgcatggattctttccttctcacatccattttctatactgttgctagagtggtctttctaaaatagaatagatggtactgtgcttttacctaaagcttttcggttgacatcaggataaaactcagacccctttgaatggcatgtgagggcttttggcttttgtcccaagtgttcttgtccagttctttctcctatccagaaccttgtgctacactgatggcattctctacatatgccaggcagctttagggctctgtggatttgcacatattgttctcttttcccagaatggtctgcttctctatctacctgtttgttgtactgtcactacctgtcatttcagattgactgtccttccgtggaatggttaaataacactggatagccctataacggattgtgctatagtctttacaaatcttcttgtaggagaaaatatgatgacttagagatatgtttatattacattgtcaagtgaaaagtgttgtataatacatgtgtgattgacttttctttctttgcttttccttttcttttctctttctctctctctgtgtctccctttcctttcttccctctttctccctcccttcctccctccctccctccttcccttccttcctctcttctctcctctcctctcctctcctctcctctcctctcctctcctctcctctcctcccctcccctcccctccccttctctcccctcccctcctctcctctcctcttgtcttcccattgatctttcaataaaaataaaagcctagaactctatgtagctaaacgttaacagtgtttatctctgggtattgggattattgatctttagaatgatcttcattttgtattttctaaagtttctataatgaatgcacattactttttaacaagaagtagtaaatgctattttcaacaaaaaatactgacttgtggcaagtactatgtcttacttatctttgtctttttagaacattgccttcctcatggaagatgtattagttagggtaggctaactgcagtaaccgatgatacccttaatatataacaagtaaaatgcgatagtttatttctacctagtgaatgaacagaacacaagatgttctggtcctgactttcccctgaataaaatctgcactaactaacaccgaggcatagccaaacctcacctccagaccaaattggctgaaataggcagggttccaatttgtgacggtcatttatttttaatggcctttctattccctgaaatgtagacaaatttgccctttgctgcctcattgcagtggaagagcctcatacctgtgtgcagagctgatgatgaaaggcatctatgtgtgtatgtgtgttgtagataaatagtgtattaactatgtgtaattccttatttcaaagtagcattttatgggtgagttttgcaataaatcttcaacgtttaatgctcactatgtcttgtttcatttgatatcactgaaaatgcagagggtcaggccacattcactctgtctctccctggcatgttaggttgccttctagagctctgtgtttcacaaatcattttgatgtagagactgtggagaaatattctcaggctttatcactgctgacttaattgagtttcatgatgcgcttttttttttttcatagtaggataaattaaaaatggctgataaagctgcctgtaaaagcaaaattgttaggttaaacctgcctggtgtattaaatgtattgataagtaatttggccaccatttttaatcacttttattaactctcaagtagttttatttccagtaacttgcaaaataactgtcattatggactcagtcatatttctctttaaaatactattgaaaagtccatgaaaatgattaaagtgccaatatcatccacctacttcctgttagcaagaattgttggtgattttgtgattagctgagtatatggttgtgctctctttgtgcaacccaggaggaaatagaaccagttcatcccaggtgaatagagataatgaatgggtttgaagccgtgtaacaggagtagtcttttgtgcatctgtatcatgtatgttattgttatgctgtctttaaaacattttattaaatattgagaagacaagatacttgtgaattatgtgtaaagtgtaaagaatcatgatacgtgtaatgtgcctttcggtgtcatctttgccatcggctgttcggctttgtaaggatcttgagttcaaggtcactaaagaacagcttaacacattgtcttgctcacaggtcaataagggatatatctcttcattaaaatggatgagaagtttgtcattactttactgcttcttggctagatgtgtggcttatgcctgtaatcacagtgctttgggaggttgaagcaggagaatcgcctgaggccaggagtctgagaccagcttgggaaacatagtgaggccctgtctgtgcagaaacaaaaaattaaatttgccaggcttggtggtgtgcaccttcagtcctagctactctggaagctgagtcaggaggatcccttgagcccaggaatttgaggttacagagagctatgattgcatcactgcactctagcctgggtaacagaataagacctgtctttaaaaataaaaaataaaaaagaattccctgtattttttccaatccatttgcatagcctccaaatcccattcctttcccctcagatttcggcattcccaccctatgggagaaattattatagttgccattcttaggatgtttcccagataaattacaggaatcataagattgctaaacaaatgtaggtggctaatagaaaaagagaagcagtaagcctacttttttcatttacttattcagcaaatgtttatcaggcatctattatttgataggctttgtactgatttctggcttgacaatgatgaagaaattagacatgcccctttctgagctaagaagataggcaaaagggttacacaaataattatataattacagttgtgctaagcctcatgagggaaaagtacaaggtcccagccaggtgaacatataacagaagaatctatcttagtctgaaagatacaagaaggtctttttgagaaagaagcatttctgttagggtagggaggaggggaaaggaggagaggaaagatttgcatttccaaccttggggcagagaaggtgaggaatagcagaaaggacagtcagcacaaaggaagcaaaaatggggtctgagaagtaaggaacaatcagacgattctagacttccaggattccagattttatcttaaaaacaggggaacccaatgaagggtttttaagaagaggagttatatgcttgtcatttcaaaaacatcacaactgctggttataaggagaatggactaaaagggaataagagtgcatgcagggagctgaggtggggccccagttgagactggatgtgtgcctggactagagtgggagctacagaagtgaagagaagtgaaagatttgagatgatttttggaagcttcttttagccttggctgtgatggggcaatgcctacaaagggcggtggggaggatggcccccagtgttctggcttgagcaaattgtatgcacagtaggtgatgcgatggcaaatactgcaggagaagaagcccttgtttagtgtattgtcgacatatccacatggaaataccaaggaagcatgtgcttgtttggagctggaggtcagaagagaattccaggttgtcttttgagtgtggtggttttggacaaggacatgacatttctagctccatgaagtagataagattgcttagggaaggtgggagagtgtaaggaaaagtgaagagaaaaggaagcataaggaacagccacctttaaaggtgaggcagagtgatgggaaagaagcaattagagcagtgaaaggaagacccaaaaaggattcaggagggaagagtggctgctgcatctgtgtccctcgaacatcctgatggaagaggaggaagacagagcccaaaccaggactttttgagtggtgactattgccacacattttaaatgtaagagtgcacattgcatttaggaccagtgaggacttaggacagagttctggccaatgccagaggtggagcccagaccaggagcagactgaagtactatttgccaacttccggttaagattgggttttagtaatatttttatttatctggacataagtagcacaaagctgttttaaatactctgaggctttctttggtggtgggggataagactgggaagaataactaatttgagagacccaatggatagtttgtataaagatatgattttcaaaaaatcatcaaaattgattaagtgttactaacgtgttgctgaaggtcactcgtttatgtgtttttctcctgagctaagaattctttcctatgtaccacctaagccctttcagtgacaaattattgttcaaatttttcttggcacactgacttgagaattaactaccattcatagctggtacccaggtcctatgagaatacaatgccttgtcacataaatacttgtgaagtgacatctatcaatctaatttagaaaaatatttgagtcaaaaggtccttgaaccatgtattaggttgacacaggagctccctttatctgaagctgtgactgagcattttaatgaatggcagtcaaggaattcaaagttattattctgatagtaattgcgtgcatttttcctgcccatctatatgcagccttctcattgtctaggaagctgctgatttgatgcattcatagctattatttgcatagggaatttgaaccaccatgggaagaatgattttgaatttcctgttttcatttatttactttgggtgcaataacagtgttttcatggaaggattttttatattgggtttttcctaattttaatacagtgtaaataagctaagtgttatatttctgaaaaccacacgttacaaatttttaaaaatgggggaaagatgaaaatgaaataaaaagatgggaagacaagttctgaaacctctgaccttacctgcgggctcctccctctagttgaccatggagaaccatagatgacttactgggccagatattctgatcttggacagaccaatggtttgtaaaatgggttgcatattatagtgtgcaaattcctggactagacttccagagatgatagttcatgtggcccagggtttgtcctgagaatctgcatttttgaaaagctctccaggtgatttttagtgtgcacttaagtctgggagctcttggaattgtttttttcaactaataaagttgaagacaccctgcacaagattagaagatggataagaaaagagaattagaatttactgagtttctattatggctgaacatgtttacatatcttacgtcatttattctttaacaccatcttgcaaggtatatcattttgttccaattttaacctgagattcaaaaaggtttacagaactttaaaggtcatgcagctgctgggaggcagaacctttatttgcctccaggtcatctgatctgctgtgtagaaccacgacaaggctgggaacaagaaggtctggatagaattctagtcacaccatcacttgggtgaggtccttttgccctctctgccaacgtgggtacctgttgctaaaggtagactttcctgtttatcatcaaagagtgcctataggtagatgagtggggaggactgcatacattttgagagtagtaaaatcagatccacttggacaaaactgtcttcaatattctacaatgaacatgccatgttattgtgaccagaattgacattgtatctctaccctacgctgacaagttgattgtctgagcgaggaaacagcactcatcatacatttatatttctccaggaaggaaaagagacatggtagagtctagtggggaaaaatctggcttcagattggacttagtacttgaattaagggtcaggcattggcttctacctctcactctgtactcatgaccttgggaactccatgtttctaaactttatttttagttttctctttgtaaaatgagaatgatgtgtctctctcagatcagtgagtaccagctgagatcatgtctgtcgagcacttaggcagtggtaagtgccttctttctttctttgttttgagacagagtcttgctctgttgcccaggctggagtgcagtggtgcaatcatggctcactacaaactctacctccctggatcaagcgattctcgtgcctcagcctcccgggtagctgggattatagacatgcaccgccatgcctggctaatttttgtattttttgtagagacagggtttcactgtgttggccaggctggtctcgaattcctaacctcaagtaatctgcctgccttggtctcccaaagtgctgagatgacaggtatgagccgccacacctggccacagtaagtaccttcttaatgttaatcagcagagggaagggagagtgactctctgcagcaggattcagtggagctagagatccagactagcaatagcagcagaatgaagatgaatcttgactacttgattgctgcatttttcattattttaggaacccagcggttctcctaaaatgcatgccaaaggtcctttgacagggtgctgctccagctgtggtttgtcggtctgcagtgttgtaccaccctggtgctcattaggactgcaaattcccaggtcaccttcagatgtaccactctccagatgtttctcatgctcactgcagtatgagaagcactactttaacaggcaacctccttccaggtgaatcatgtctggagaagttgcttggtcagagagatatttgtccaggctcagccatgctggctctgcagcgagggttccttcactagaacaccatgcatttgtggtggcagcataggtagaaggcactgagcggaaacaagaggagcgagatggagaaagaaaaaaaacaactttcccggaaaagttaaaatgatagcatgacctttctgaatggactttgggacatggcaccaagaatgagcaataatgaaataccaaggaaggagactccttaggagagcatctgggaaccatgcaaccatgcgacaagaggtgatgcagggaagctggtgagagggtgaactgaggctcccccaggggcgaggggggatacctcctttctgaacctcatgctgaacccgaccctcaggagcaacagattggggtaggagcttttggagaggggaattgaaatggccttgttggcagaatgactctgaagggaactttccagcacacccaggaaaaaaacaaaacaaactccccaatctgccagactccactttcttaactggagggcagggtggttgctcaaatattttgggctcagggctttggaaagatttcttgtcttgctgcatgctctgtggaaccaggctgagagcaggatttttgcatttagaatatcttagcagaactgggcaagatgaaaaccaatctttttgtagctaccaaaaagtggacatacttcagctttctgtcttctccctgctgacttgggtgtatttggtgtgcttgctctgtgctaggcccttcctgtctcttatctcactaaatcttgacaatatccccagagattggcatcattatactcattttacagatgaaactgtctcagaggggttacggaatttgcccaagacacacagctgagtggtgaagctggaattcagaaccaagttcggcttattagaaagtattcttatatactacatgtagaaatgaaacgcaacgtatgtgacagccattataatgtaaataataaaagtaacaggattttctccctgccctccgtaattcagtatacttgttgattatttgctgcttctggcaagctatgattgattgctgttctgtgggatatggagaagtttgaggaatttatgatacagctggggagaaaagacatattgatgcttgaccaggattaagccaccatatctcacaggtgtttagacaaaggagaaggcacctctgctaaggcacatcagggaaatctctagggaagatactgatttgacatagtactttctgggtatatagaattgtttcattttgtttgccgagtatgttaaaactgtttgcagggtgtgttaagatgatttgcagaagaatgttgcatatattattcgttttgatttggaaaaacaattaaaacaaggagagtcttattatttgccctatctttgggtaacttctgtactaacaaaactccggctcaccagccactagagttaaaattctcactaaagaaattgactaaatggaagagaatttatttctgatttcctttttaatgtaaacatatgtattgacacttttccttggaagaagtgtagtttctcttttagtagaaggaaatagaattatactctggcttaaattctattattataaacatacttctgtttttatcttgagataaggctttcctatatactgttgggagtctatagtgatatagtcattttctatattatttggccatcatttattcttttaaattcatttataattgtttttgcatgttttattgctaacatttaatagtgaccacccattaaagctattgcagtacctaagtatttataaatttttctgacatgttattgcttctggattataaactgggaaataattaagattcttgttcttgttgtaatgctgttatggtgatgatttagtatttccccaaacagtttatataatatggtctttttccacattggtatgtttctttatttgctggacagggtattttaatggttacatctaaatggaataaactcatagagctgttgatttgagaaaaccttctataatgccatattaatctatttagctcccagacctttcttagcagatcaaaggaatttcctggccactcccagaggtctgaccgccttttatctgttttaatgaaggtaattaaaattcctcagcttatgaaggtctggtcctggtcctaagtgaactagtccccagcagaatctgaaagaggactataagcaagccatttatttctaaatttttaaccttatatttctgtagatcctgattaaggtagttcctgcagtgtgagggcaaacttaggttgccagtattttagggaaatatgagttcttctttcataaactctgatgattattttgattcctgtatcattcatttgaaatgaacctgcaacactttgtgggtacataggaatgaagcaaatgcactctaaataattaaccagttgtgtcattgatttctactgataggtttatagcaaatgactttacacaaagttattaattaaatgctgtgttctgatgttgtctaaaaaatgtcatctggatgtccacagtttaaatcctcaacaaaatgttaaaagtcacagaaaaagtctttgacatagcatgacttaggatctccatattcatagttatttgttgagtaaatgtgctttgagcacttatcatgagccaaacactgggctaggtgttacagagacagtgctgaacaaagacctcgccaatatggtgcatattcccattttacaatctgtcagctcagccagtctcttaaaggccatcttttcctcaaacgagtttctgaaatgaaaatgaaaagagtcatttaaggatttaatctgagttctagtctataccctgaccacacaatgggcctcagggagaagaaggaacaagacaataccttactagagcaaaatgacttcccattatagaacatggtctggcactttcaagataaatgaagctgtaaagttaagttgtgcaattagtggacagagacaggtaatttgtgggcatggaggaggtttccaaatattcacagcaccaagtgatcaaaagctgtaagtagcatttgtgcacttttcttcatacattttacattaagaaaaaaaccatataggttgatattaagcagctaactgaaaatgaactgtccttaaaaagtaagtaaataaaaaacagcacttttcctgatgaatgaaggactgtgaaaaagctgttatgggcttagcctatgtagttcccagcattattttaaaaagatgaagaaaagaatgttgaagtctttgcattttcaatgcctaccaggtgcacctgccactcctgcatttctgggtttcacttttgtccattgctagctctcatttggtctgcaaatgtctgagtatctttcatgttccaggaactgtttgtgtgagatagatgcaatggtaaataagtcaaggtcgtcaccttttaggacctcatcctaccaacttaataggtgctagcagagactcgttgtgtgtctattataggataagtgagtgaaagtcctccttaggtaggtttcatcatctgcacttggatggaatgaatttatgaatgttcttagagacacttatagatctgagaaataaaaaacacataccaagaacttattgttgggatgaagaagagtaaataggggaattttttgggttcctcttctcctcatcctccttacaactcctcctgctgataagatatttagtcctatgattgacccagactgtcattttttggggcccttctctccatgcctgtggccaagccctgcctgggcttgtattaccagggatgactccacatgcttcttgcctgctattcacagaaggccctcttgtcttccgtgctcactgcgtggatggaacacccaggcaatgggacaccaggggtctgtatgtgctgcctgtgccagtgttctgagaagctccctgagactggtttggtgtaagggctgtcagtctgctccacaaacccagaataaattggattggaaaagtaggaaacctcatttagcttttgtgcctaaactttgtatacccaagcactgtttaccaaaaaagttctggatttggaagtagttaagtattcaaaacatattcaactatttatgaaaatgatgcttattattctatgtttatttctctcagcagggaagcccaaagagtaggggagatgaggagtaggttgtggaatcaacacccttcctcctgcctccaaaccacctgcactgcccaaggaggggccattcttttttgggagcccattatgtacttagctgtggatgagggtgtatgtgtgtcttatattcctgcttacattatggatagaagattgaaggtcacacttctgtgggtgtcctactgcacccaaaagggtattttacataaagcatgaataattgcaccttttcccccaaatgtcatatactttgatataacattttgtagagttaggagtcaggctttcatggggaagagggctgggttatgtccagttaatgggcaggcatgtagattatactttgcttttgataggtgagggactctttcaagtactattctacttcctctgtggttagtttttttctcccattcttctattctttttcatctttggggctgtacatcaggggaggagggtgctgcagtttgctattataatgggaaaaaatgagagagaaagcaaagagagtaggtaactgtactcagctttatttattttatccacacctcaagctcttattaggaaagggtgggttcttcttttctttttttttaggggggcggttttcttatagaataattactggtattctctggttgataagctaagagaaaagagagtcagggaaaagtactttactgtttttctatgttgtgttcattggttgtttttgtctgtctagtaccaaactttccaccaaccacataccctcttcacggttcccctccttccttctccaacagggaaaggcaggcaccagtggattcctctgtagtcaagacttaacataaccaggaattcttcctaaaggaagaagctatcaattagctaattatacttttcccatcccaaatttgttggacttctttgaagacaggatgatttaaatgagtggagaaggcttacctgggtggagggaagcagggagtaccaacgcatagagtgggaggaaggttggaaatatgagtgagagaaggtgttgatagtggaaggttgcagagaagttgtctgagaacttattcagagccagatggaggaattgttctactgattctcaagaagaattgagagttcttgcagcaattgttattatgtggttttgcaacttctctataatctcttataagagtagtttctcttagaagcctagtcagtatacctgaaactttaattccacttaccattataatgagaaaataaattgtcttattagattctgtgcaccaaggggcaagacctgaaaggaggatggaacggtgtgtagcggggatggcagttgatctgcaaaatcaggcatggaaattctgaactgttattggagagggaaaaggaacaagctacagttaactggtaaaactcagtcatattataggttaatcaaggccatagactgtgtgcttggtactatggaagataaagtgatatggaaagcatgatcagtgaccagtgggcttgtaatctaaatgtggagacacccagaccttagaaaataactatcccataggattatttttggcaaaatgtcaaatgaacaggtcatagataaatgatttaagaattcagaggaggtagagctcacttctacctggaagggtaagaataagcttttgttgacggggagaggctggaggtggaccttcaagggtgggtgggacagagatttgtcagcagacatgaatatggggtgctgggttgggcactttacacatcacagtgtggatacaacaccctggaaaaaccctatcactcccattttagagtaaggaagcataggctcagaaagtataaatatatgacccaaacttccttaaccattgacaggacaagttatagctgaatttcagacttaagccctctggctccaaacccatcctattccagtaccagtttgcctttatgaccttctatacacagaaatgctctgagaacaagaaagcaagtattttgcacccaggatggaaaccacatcattttggtaagggtacaggtcatttgggaaaaaatgagtgatgagtttaaacagtggtctaggtttggaaaaatagtctagaactattgaaggaatttcaggcagagaatgaggtcagccaaactatgttttagagagaagagctgcaaaaggaatgattttgtagatatggcaaatgtttatttaacttgtagcattttaaactagattacttttagcttaggtctgcatctgaaaatcagtgatttacgtagtcaacctttatgaaagttttctttgattagtcaatctagaaaagcataggctttattttttttaatttttatttctcatgcttgtgttttgttgcattgcgtttatcctggatgccttaatgaaatggtgcgatatgacccagggctctcatctgtttaactttgctaatttgctccattttcaaatgagtttccttggctgcaggagcagcagcagagcatgaactctgctgaaaggaatttcagttacaccgctactgccacctctggggcccccggataattttcttatcgtctttttgccgtttgggaacaaagccacgttgttcacgactgaaatacagtttttaaatgtgcctcctaccgtgtttttatagaaagagagcctcttctcctggaaaataaaacaccattgattgaaccaacagcccttcgaaagggctttaattattgcattaattacaaacttcaggacaaaccagggcccagtagtagggagccattgagcagatttctgagcggctttaaagaaaatgttaaaagccttttagatctaagaggctgaaattgagagaaggaggtgggcatgtgggagacactaccttcttcaagttataagctttgcattaaaaaatatcctcttccctctctgatttgtgtttcctgggaaagctccaatgactcattgctccaaggcctcaacattttctaccctgacattgatgagagagaggaaagtggggaggtggtctaaatgtcatagagtagaacttctccaaaaaaataggtcactggggaaaaaagaaatactcttggaataatcctttaacatgatcatcttcaaaatgctcactttttattctgaagaaaaagaagaaagaaaaaaggcaagtaatttctttctctggcaaaacattcactgaggtgttttcattcaattactttgatggttggctgttgggaaaattatcaaaagtgaatatgggtttgggaactactagaagattctcaaagttgctttttatgatctctttcccagggaaaataaatcattaaatactgaggtggctagatgaaattgaatgctacatctcatggtttattcagaatgggctcttccatctgacatccttttgacaggttctaccacatgtggcatttctggcaggtatgagggtaggtttcacattctaaaatgaaactggcagtcacacgtttccctggtttaaaacattttagcacttattatgtgccaaatagtgctctaagctgtcaacatgttaactcatttaatccttacaacaattttgtgaggcaggaactattataactatttagcagataaggaaactgagccttagcaaggtcacagtggagagcaggctgtccggctccagtgtctacttaattctaaccgaatactctgggagacaaagacgttcgtctcaattcatatcaccttgaatattcattgccagttgatgattgttattcttaattccctgcaaagactcaaccagtcaaacaattaatcaaatactgatttaccaattttctgggcacaagattaggcattaggagatgagtaaagatcccattcctacattaggagttcccaatctaatacagaagatggataagcaaatagggtgccagaggttggagtttgtggctcagatttgggagggttcatttatcaattcattattttaacaaagtgtagtgctagtatatgccaagcactgtgagtgattcccccatcccctgctcctcagtggttgcagtctgatcaggggagatggataagcaagcagcatgttgcattttggtgtgataattgctgtaattatgggcaagtacatgcaggggtactacatttgtaaatgtaccaagggaggtaatggcctgttcaggaaactgcactgtgacttagcatggctggagggtccagtgaaagcacagagaaggtaagaggtgaggctgcagaaggccccagaaagggttgggagtcaaggacattgtctgccatttcagagactctggactccattaggacattgagaatgttacttggtacccagcagtaagagttccttttcatccaagctctcatgtcactttaattgaaaagtagaaaagcagaaagaaagagtatcctaaaattaagcaatgataagacactgcaaatttccgaagattggaaattgccacttttatgtagagcttatggctattttctcgctggagacagactgaaaaagtgaggtccatatctgtgtctatttctgggatattggctcagcaataaagatgttagaaaaaataaaatgatggggttaaaaatcaacacatgtcacattaatttctgattcttctattggaagaggatcacatttcaaggtcaaaagatggagcagtgagatttgtagagagaaaatttatgggtggatatttgaaaattttctataagtaagcattgagaacattacgaagctaccagattttgtaattttcaaaattacaaggaatgtagtggaattggataatggatggtggaacctcttattcttggatcattggtttagatagatcccagattggcaataatggaaatttatttcaattttatgtctgctcagtggctgaaatgaagtgggttaataggtgcagttttgctttttgtggaggaatgccctagtcacagaaacccctaaagcaaactggcctttatatccccccagatgtttttccaggatgggtagtaacagagagggatatctctttgtcttggatttcctttatattgtgtgtcaaaatggacagtgtacaaagagtactattcaaaagtgtgagactaatctcagtttattgtgaaattcaatggatcacaaagtactgtgtccccaaaccaaaacagatgattggaaaattgaagactagatatttggaattgcttgaatgctggaggatggtgtgggcaggggtggaggcctgggtttctggcatgtaaccctaaagtcctttttatctttagtcttgtattctacctgagtagtaggtattgtgaaaagtatgttttctatgagtttacagatacagttcctggcataatgtacagcatatagcaggaatcctgtaatcattgaaggagttaataaatgatatcatcagcatagaacagtttggctgctttatgtataactcaggctactacagattgggtatctcttatgggaaattcttaggaccagaagtgttttggattttggatttttgtggaatatttgcttatacataatgagatatagaggggacgtgatctgagtctaaacatgaagttcatttatgtttcatatacaacttatacgcatagcctgaaggtaattttacataatatttttctttttctgttttttgagacaaggtctcgctctgtcaccccaggctggagtgtagtggtgcggtcatggctcactgcagacttgaccttctgggcacaagcgatcctcccacctcagcctccctagtagatgggatgggtctacaggcctgcagcaccatgccaatgcccagctaatttttgtattctttttttttttgaaatggagtctttcccttttgcccaggctggagcacaatggagcaatcttggctcactgcaacctccacctcccaggttcaagcgattctcctgcctcagcctcccaagcagctgggattacaggcatgtgccaccatgcccggctaatttttgtatttttttgtagagatggggttttgccatgttgcccaggctggtctcgaactcctgggctcaagcaacccttccaccttggtctcccaaagttctgggattacagacatgagacactgcactcagccttatacaatatttttaataattttgtgcatgaaataaggtttgtgtacattgaaccatcagaaaaaaaaggattactgtctcagtctcccatgtggacagtctgtggttttttggcatcaccgtcactcctgactctgaatttatatgctactgataagctttgtgttcttacacttattcacgcataagtacttaacagtaaaaaatatgacatgcatatctggtgtgcacagaaaagatatatcacagatgaaggaggctgggagggccttttttcccttggggacattgaataaagcatgtgtgtgcacctgtgttttgattgcgactggtcacatgaggattgggtgtggaattttccacttgtggtgtcatgttggtgctcagaattttcagatggtggagtatctcaggtttcagattttcagatgagggatgctcaacccataaacccatatagagataaggagtcttggtacaacatgtgctttatagaaaggaaaattttaggtctcagttgtagacttagagaaattcaggactaagacatttctgtgcatttagttccttttcatttttattttcctaccaccttcccccagccagctttcatctttttctctcaaagctctgcaaatcattgaaaaaattttccatgttattttttaggacaaaaacttactaaaagtcatccatccagcactgagttcttactcacgggggtcaccactgctgtgttctagttcctttgcttttgttttgttcactggcccctcctctccaatccctgagctcctacactgcaggccttcctttttattttacgttttacactctcccaacctgactttatcctttcaatcaaagatcattaataaatcttgtattgccattacctcataaaataagtattccatttaatcacattatctatgtatctgaaatcaggaagataccgaaaggtggtaaacaggaaatgggaatattggcagaaatgtactactgtacagctgagaattgtcattctctttgtttttttttttgtcgaaaataaaccttctgacagagatgatcagagaaagggatcataagtggtttcatatgaatatcaagattggctcccattacattttggcactaggtgttaagtttttatctctctgatcctgataggtggtggtacttggtgggcagtgtcatgaaaaccaagagaaccagggccttatatttcttttattttaacttgggtttttattttttttctttgcaacttttatattatgttcaagggggtgcatatgcaggtttgttacttgggtaaattgcatgttgcaagggtttggtttacaaataatttcatcacccaggtaatcaacataataaccgataggtactttttcagttctcacccttctctcgccctcaatccacaaataggtcccagtgtctattgttcccatctttatatccaagtgtactgaatatttagctcccacttataagtgagaacatgtggtatttggttttctgttcctgtgttaattcacctaggattgtggcctccagctccatctgtgttgcttcaaaggccatgatctcattttttttaataactgtaaggaactcaaatcaacaaacaaaacataacttgagttttgagaggtgttttctaccagatacttccctttgaactttgtatgtgacttcctagagagaaagtgtgttgaggaagttcactattctattctgcagtgagagaagacgacaggctaccagggaaaaatagaagatcaaaacctttttatttatttatttttgtttgtttttaaagtatctgtttccatatgtatactattgtgcaaccaattagttggggatagcggatttttatgtagctggcaaacttatcaggcagaagagaattatcatgtatatttcagcagcaatttatgaacaggtttgtttctaaaggatgcacatgtattttgggtttcactcttagtttcactctgattaatttgcttaataaatcttccttcttaaagacagaggagaggcaaacacaagtcaagcttttgttttagccagtagatttataattaatgacttttgttgatttaagaagctttctgaacaattcttggaatgcagtggtggcatcatgaaaggagcaaagggaacattttcgtgggacataagtaagatttaggagagggaggagttcacagactatcattaattttacaggaggagaaaatcaatgtcagtaggaaaaaagatacgtacaaaagatgacttctggatttgaggaaccattctcaatagcagaaaatagagctgttctcaagacatatgttaggtctctcacaatctatcagcaataaaaaaagatagcaatatagagatgaaagaggaagagagaagaaggattaagatcagctgtcaaaatgttgcatacaaaatgtattgaatgtcactattataagaggtcttactgtaattaaatttcctgtctatttggatttgctcatcttaaagctttttcagttgtcagtgtgagaaatgtttcctatctaggtgttttttcctccctgttaagtatcagcacagtgtaattcaccatagttgggtagggtggtactgagaatgtttcctacctcagcaagcctaatgtatatgattgctttttgtgaagagttttttttccatttctaccattaacaaggtgttagacacttagcttggtagtagacaaaccattagatcaatattcccagaactagagagttctgatattggcaggcattatttattccattaaaaaatgtcatattcatttaacaaagatggaatgcagatagtttcaccgaagccatgagtgtgataaaggctatagacaaaagattcctgtgaagtgaccatctggaccagtttaggtgttaggatttctgaggttcttgaacaagagctgttcctgctagctcatgttttagaacccatgtacaggaaaattgaggttgtgtttaaaaaatatggcatgtagcacaggaaatatgtgttttcagagcaaatgataacttaatattggctgaataatttgtaagaatactgatttttttgtcatataacctatatattttcttaaggaagataggtttataaggaaaaattgcaataattaaactgagcataccaacaaggaaaaataatttaactattatgatgactcatttagttggcatcctcgagtaatgaggtgctctagattaattttcctgagagcagaaatatatccctttaaatgattaagcattttatcttcatcaatctttgaataatatatttccaagatatattttacattcctttgtgtcataaatatgctttacaatgtatagggctagaatcatagtttttttttttttttaagagtttaaagaaacactgggagatcttggaaaataatattaccacattggagtgcaacattcttgtctctgatatatgaggttttgattagatgatcatcaaaattccttctctttctaacattctctaaataaaaagtcgtttatgttttaaattgtagtatatataagaatcagctagggtctttgttaaacttgcagatactcagacatcatccctagaggttctgatttagtagatttggtgggagagaagagaatccgtatcataaataatcacctagagccattctgatgacctcatttagagaaacactgattctctttccactcttgtataacagacaccattactcttgctggccacgtggtccttgaaaagatcattgctgctttaccctcagtggcattgagttgtgaggggctgatgagactaataactatgctttgatagtctttgctttctgaacctttcctcagtattacctgtcactttgttaatggtagctactgaggaaaaccagatcatcaagcttattaaatcagatgccctgtacttgtacatttaataagtcattgagttctaatcttaggtctgggtagaggcaggggaaggactgtctattttctcctgtagtctaaagtgcatgcatttagcagtgatgattatattccctgtttggaggtcttttactcttttgtcatgttctggttgttttaagaaagtcaagttttctagaagcatgacgtcagaataagtggcacattactctataaatatcttaattttcatggtgagattcatagtcaggatggtctatgactttcaaatattaaaaatttaaatataccataaaattctcctttaaagtatactgttcaatgatttttagtaaaatctgtaaatttagagttgtatgaagccaacaccataatctaattttagaacatttccatcatcccccaaaagaaatcaggtaactgttcccactcctaaatccagtcaatcaataatttacttcttatctctatagatttaccttttctagacatttcatatgaatgagatcatacagtatatgcccttctgtgtctggtgtctttcagttagtgtaaagttattgaggttcattcatgttttagcatgaatcagattgccaaataatattctgttgtatgcagttactacattttatttatccatttaccagttaatggacatttggattgtttccactttttgactattatggctagtgtgttcaaatctttgtgcagacatacattttaattctacttgagtagttttacctaggagtagaacttctgggtcatatggtaaatctgtttcaaggtagcagtttcacatgttacagttctacccgcaacgtataagggtttcactttctctacatccttgccaatacttattattattattggatacaagtcccttattggatatatgattttcaaatactttcacctagtcagtgagttacctttttactttctgaatggtgtcctgtgaaacacagtatattttattttgatggatccccgtttatctttcatctatgcatctgggtactttttttttttttaaagaggaatctttaacccaatactcatgccttcttgaggcttactcaagatcttgtaagctttgtttagtatgaagtccctagtgatacctagcatatagcacctagtttaaacagattacagatgaatattcaaagtttttgacctgaatttactgtagtcaacagttaccctaaagccttaaagattaccaaagccatgatagactcagccaccatcatgcaatggctatgtccttcgtagcatcctttcttcacattcatctttgctttcagcatatgaaggggggaatgtaggtctttaatttaccttgtactgtggggtagcactatcctttccttactccattttcaggcccttggatgcaggacccttctctgaggtcccacagaggtggaggcccagcctgagcttttacaggttttagagtaagatgtcaggacagcagttcacactcagccacatcccattaaaagaaataaaaaagtggctgggcacagtggctcatgcctgtaatcccagcactttgggaggccgaggtggatggatcacttgaggtcaggagttcaagaccagcctggcccacatggtgaaaccccatctctattaaaaatacaaaattagctgggcgtggtggtggacacgtgtaatcccagctactcgggaggctgaggcaggagaatcacttgaacctggaggtggaggttgcagtgagctgagattgtgccattgcactccagcatgggtgacaaaagcaaaactccatctcaaaagaaaaaagttgctgctgtagagttttgtcataagaacatactggctgcagtgtccataggcaaagatgaagctttactgagggctgatatactcaatacttctgcccagtccacttgagtctgtctttgcctaaatactaaattgtttgaattctcctttagttttagattttccctactgaattgacatggagaaatgttatcaagtccaatttgcaagaatgctggatttccacttggagcttttgttttcttgggcctagaaggcatctcttgtttataaaaaaacactgggcatcattgtacatgagaaacttaaagacagtgcatatctggtagcagttgatatacagtgtattattcctaaatgtagtaataacaccttacaattggaaaaaaaatgagttatagatgaccaaatgcttccataaatatgatcacatttggtcctcccatctctgtgaagaattattattcctcttttacaggtgaagaaaatgacttgtcagaagtcatttatttccaaatataggacttctgataccaaattttgtgccttttctgtagtgccatgcttcctctccaaagcaatagttgaatttctgcaattttaagaaaatcatatatgtcgtgttatattagacccgtggctaatctataagcagtcatttatattttaaatgaaatccattaatgatatattcactttctagggcttatttccatctcaagcttccatttctgattgtaatgtgtaatgttgcatttcctgtgaaaggaattccaggctttggattgtaggtgggtaagattagtggtgggtcttagagagtcgggagatcctgagcatgggaacagccttttgcccgtaagtttatactgtgctcaaagatagtctgaatagttttaggctgcctggggtcccaaggagactttatgcctcccgatagtaaattttgggtccccaaagacccaacaatatttccatgcgatcatagcttgaccccaatttatggatgcttccttcctttcttctttaatccttgacaactttcttccccaagatttcctcgtgtcagggacccagaggccattcttactatgatctctttcttttccatttcattccctatggcttagaccatttaggtggggcagtggttctcacagtgtgaaccactcatcagcagcaacagcttgttaaaaatgcaaactcaggacccaccccatatctgcttaatcagaaaggcctgggaggttgaaccctccagtccgtgtttgatataccttccaggggttctggtgcatgcgcacatgtgagatccacttgtgcagtggttaagagcaaggattctggaatcagcagccaggtttcaaattttagctctgccatttggcagctaccacttcctgccatccatttacctatatgatctttggggaaattactttcctctctagactttaatttcctaatctgtaaacttgtggaataaaatatgaattacctacatgggaagttgtagaaatgaaataaggtaatgcatacaaagtgtctcacgtgatgtctggcactctgcaagcatccctgaatgggagctttcatggttgatatggactctgaccctagtcattgcctgcacagtgcttgatgaccttcccttgcttgtctctagcagcttggcatttaactactcaattctaaacctgaatgtttgccatgtgctccattttcagtagtatgaaaatgagactagttttcacactaaaatccctgtatgaaatatatttgaaattttgcttaggtcttgcttttgttttctgccacccagccagtttcctatctgggataggacatcgcttttgataataattcaatatttaaagcctttgtttaagaatgtgtcttaagacatgtttaaaagtctaaataaacattatatcctgtctcaatttatctaccacttaaaaaatttcaagtgttttttatctatctatgtctatctattgatatagaatctatgtagggatatagaatctatggattctaaatagattctatatagatatggataggtttgatatccctatctgtggcttttctcctataacatttttctaacttaattgtcagaatctgttctctagtagaaaatccaccgatgtcagaggatcacttgagtctgggaatttgaggctgcagtgagctgagatcatgccattgcactccagcctgagtgacagagagaccctgtctcaaaaagttcatcaacatacagtatacttccaacaaatccacagtaaaatttaatgtattggatcattttcagactcgcggcagccagtccttgggctatttctatgagtctttatgtaactttgactacaaattcgaagttgtcctcaaatccactagaactcctggttggataccattcaatcctggtgatttattttacttttatttgtcagttaggcctagtacatcccttgcatttatttttcctgaatttagcatatttagactgcttacttcagaagagaatttgttttcaaatattctctttggtaaaatatacctcagaagttggatttattccctttcctatcttttattcatctatgtactgcacttatttttataagttcatctgattcttcagctggctttctgccaatgataaattaaaaaaaaaaaactacacataaacgaaaccaacaaccagaaaacccttttaacttgttatttatttatttatttattagcaacctttaaactctttgaattatgtcatgaatttcctctgacttacaagctcacagggcagcattttctaatagtgttttgttttagcctgaaataaaaggttccatggtcaagttagcataggaaaggctacatacttattctatgcccctttatcccctagcctctgaaacagtttagtaattcataattcacagtagcatttgaaacactctgagatgtcctgcatagacaaaccagattaacttggtttgacctaatttcccccccaacataaacacttattaacaatctgtgaactagtgttccttagaccacctttgtgtccattgaatttagaagttttcttattctcatttggcatagcttaatgtttttagatgtgctttagttttttcctctttacctatttgtttctatttggtttcttcacttacgctttttccatatatatttttttgacaagtctgtgtgacccaatttaaacttttctgatgacatttactttgaattaaaaaagattttttgttcattacttatcttcctatattctatattgaaatgattattttaatatttaatgttatagcatattaatttattaaagtattaaatatttatattattaaatttattttaagttaaataatcaaataatattgatattaaatatttaaatatttatatttaaataatatttaattttaactttatattgatataaaattatttaaatattgataaggatattactttggtagtactggtggttataatgtttttaactgtctttcttattcactgaatatattcactgactatttcatggtaggtttttaagctttattgcttttattagggaataaatgactaaagttatatattaacatttacatttgtaagttaatcttcaccataggtaatttttgctttttaaaatttgttgcagtactctatatttccttgcgatacttactctctttgcacatgcttcttcttttgcatgaaggctcttgttccagatatccacatgtctgtttcctttcctccctcagttctcttttcacctgttgtcttctcaatgaggctcatttttgctgctacatttgtttttagatgtatttgtaaacatctagacaccctaccccaacactacctattccccttcttgacttcatttttattttttgtgttgatcaatatgtaagatactatgtatttcttgtattcattgtatttatttgttctttcttaatagaaagtaaacttcccaaaaacaaggattttcatctgttttgtcactgctttgtctctgctgtctagaacagtgggacatattttaggtgctcagtaaattttcaattggatgaataaatacaataatctcagaagatgtaaaaactgcattccataaaattcaaaatccattcatggtacaaaatcagtgaactatgattaaaaggtaaaaacattgagcaaacatgatatttattggtgaaacattgaaagtattcttttttaagattacaaacaagttaatacatctttaatcagcaagataacatttctatgcagcattattatataggaaattctagctaaaacaatacaataagaaaaagaagaattattagtattgaagaggaagaaacaatgctatccctagtcttagaggatattttgtctgcatagtaaccatcccaaaaaaatacagattaagtattagaatgaataaaagaggttatcaaatatgccacaaacaaaatcaatgtacaaaatcaattgcatttctgtactttgctacaaatatttggaaaaggtaacaaaataccatttatagtagtatacaaaatataaagtacctaggaaaaactcttagaaaaacaggaaaagacctgtgtggagaaaatgataaaacaaagatccttgagaaaacctaaatgagtggtaaaataaatcatagttctgagtagaaaaataccaatctacaaaagatatgattctcctaaaattgtttatttttattttttatttttttattattatactttaagttttagggtacatgtgcacaatgtgcaggttagttacatatgtatacatgtgccatgctggtgcgctgcacccactaactcgtcatctagcattaggtatatctcccaatgctatccctctcccctccccccaccccacaacagtccccagagtgtgatgttccccttcctgtgtccatgtgttctcattgttcaattcccacctatgagtgagattatgcagtgtttggttttctgttcttgcgatagtttactgagaatgatgacttccaatttcatccatgtccctacaaaggacatgaactcatcatttttatggctgcatagtattccatggtgtatatgtgccacattttcttaatccagtctatcattgttggacatttgggttggttccaagtctttgctattgtgaatagtgccacaacaaacatacgtgtgcatgtgtctttatagcagcatgatttatagtcctttgggtatatacccagtaatgggatggctgggtcaaatggtatttctagttctagatccctgaggaatcgccacactgacttccacaatggttgaactactttacagtcccaccaacagtgtaaaagtgttcctatttctccacatcctaaaattgttttagaaattttatggaataaaaatataaaaattcctgcacctttttactcaccatggaccatgcaagctcattcctgcccgcacacagaacagcgaacagggagttttgccctcccagatattaaaactgtgtactactataaaaatagcaattaacacagtatagtattgagtagaaaaagaaaataatagatgatttcagacagactagaggacccaggaagagacccacacatttatgtaaaattctttataaagacttgactcttaagacaggtaaatgcaataaatgctacatgacaattggttaactaagtggagaaaaaaaatggatactacctcacatcacacataaaaaaatcaattctggttgcaagacaaatctaggaaattgttagaaaaatatatataagaagatagctttatgacctcagataatgaagaattttaaaaacaagatacaaaaagcatgaaccatatgggaaaagatttagttttactacattactaccctatttatccttgttaaaatgttcagtagctccaaatacaatggaaaaaagactgggaccagtgtctcacaaaagagaaaacacaaatggctaaaactaatatgagaagatacacaacctcattagcaatcaaagaagcttacatttaaatgacaatgacatatcatgttccagccagtatattggagaagctaaaatgagtaatagcaagagctgcagaggtatgggagaaacagaacattgttagaaaggaagtaggttgttagaactaatttgcaaagtactttgactttatcttgacaagtttaagataccttaaatcccatcaattccattccaatgtatagactctggagagcttttatatttatatatgtttatatttattatatattatatataattatatgcattatatatattcacacacacacacaggagatgaccataatattcacagaatacttgcttggaaaattttagtagactacttttagagcaggtttaggatcacagcaatatagagcagaaaatagagttcccatatagccttcatccccacaaaagggcaaccttttcactatcgacatcccaaaacacaattgtgtatttgctgcaattaatgaacctatgctgctgcatcagtattacccaaagtccatagtttacattagggtctgctcttagtgctgtgcattctgtgagttttgacaaacctttaatgacatgtatctgtcattgtagattcctatagaagagtttcacttccctaaagagcctatgtgctctgcctattcatccctctcttcccactaaaacctggcaaccactaatcttttcaatgacttcatagttttgccttttccagaatgtcatatagtggcaatcatacagtaggtaaacttgtcatattggcttctttcgcttagtaatatgcaattaaggttcccaccagcactgaattcccatcagcaatgaatgagagtttctgttgctccacatcctcgccattatgtggtgttgtcaccgtttggattttcaccattccaatctgtagaatcattgttattaattggggggagagacaaccaacaaataaaggaaataactcagaggttcgttagcagaatgattttaaaaattgagggctgtgcatataataaagtgacataaaactatatacacacattgtactaaagtcgatttgctgttttgatattgtactgtaattaggtaagatgcaagcactggggaaactgggtggagggcacatgaagcttctccatactatttctccaactttccgtgtgcctataattttttttcaaaccaaaatgttaaaaaaaattcgagtgttgttttctcatagataaaatactgtccagctatggaagcaatgaaccacagataaaaaccacagggctacatctcacaaacgttatatggaataaaaaaatgcagtcgaataaaaacagatgcagtataatgctcaaaacatacaagctaaatgatatattactttgggatacaactgtgataaaactcaagaaaaacaagtgaatgataagaaacagaattggtgataatgcttatctcaggggaacccccacgcttttgtgagttttacatgcaggagactatcaggtcctcatagtgaatatcggagaataattcagggggattggaaaaggaacattttgaaatataccagagcattctgtgtattcttattaactaacccgccctcgggagaaacgatcttcctagagtctaacctgctgaggttttattagagcctaacatacctgggctaagagaaaggaaggaggtttcatacaaaatgaagcgttctcttaccacatgatccagaaatcacactccttagtatttctccaaatgagttgaaatgtccacacaaaacatgcacatggatgtttatagcagttttatttatgattgtcaaaacttggatgcaaccaagatgttcattagtaggtgcatagagaaaaaaattgtggtacacctagacaatggaatactattcagtgctatcagtgctaagaagaaatgagccatcacgtcatgaaaagacacaaaagaatcttaagtgcatatcattaagcgaaagaagccaatctgcaaaggttacctaccgtatgattgcgattatgtgatattctggaaaaggcaaaactatggagtcgttaaatagattagtggtttagtggggagggaagcgtgagtaggcagagcatgtaggatcttcagggcggtgaaactattttttatgattctgaaatgatggatgcatgtcattatacatttgtcaacacctataaaatgtacagccctgagagtgaatcctaatatgagctatggactttgggtgataataatgcttcagtgtaggttcatttattgcaacaaaggtaccactgtgctgggggatgaccatcgtgagggaagctgtgcatgtgggtggggcaggggctatatgggaactctcactactttctgttctatgttgctgtgaacctgaaactgctctaaagtataaagtttaaaaatttaaaaaactctgatctttagtttagcattttacaatctattttattgaaaggaacaaataaaagttaggattaagagaattaaacatttttcatagagcatataaatatagagcatgtaagagaagacttgattctcatttcagttctgatctgtctttaactttggcttagctggttttagctgatggtttttgaaggatggtccccagaccagcagcatcaataccaactggatatttgttagaaatgtaaattctcagacctcaccccagacctattgaatcagaaactctgggagagggactgctatggcttgaatgtttgtgttccctacaaaattcatgttgaagcttgatctccaatgtaacagtattaagaggtggggcatttaggaggcaatgattaggtagtgaggtctctgacctcatgaatgggactagcaccttatgaaaaggctggaaggaactacgttggcctctttggcccatcaatctcttctgccatgtgaaaacatagcatcaaggtgccatcttggaaacagcactcgtcagacattaattctgctgggaccttgatcttggacctcgcagcttccagaactgcgagaaatacatttctgttgttattattacaaagtgtcaggtattttgttatgcagaaggaacagactaatacagggactcagcagtttattttagcacaaggcttccaggtgattctgatgtgcatagacttttgagaaccactattactttcaaccttttcatctataaaattataaataacactagatcactttttttcaacgtgtgatgtatatattactgatcatgtgcaggacagttttaggtggcataaataagagcattttaagttttaccagctctgtatttattttaaagtttgttagaaaaatataaatagcataccaaatctacaagttcactggtgtttttgcctcatatatggctaagttaaaaaaaaaagaaaacaaaaagagaatcaatggaatcaatttgaacttgatataaatagaaatagccaaaatagtaaggtgataggagaatatcacaaggtgcatggagtaatttctcaaattttgaggccttagtaaccctgcactggattaatctcctacgtattttcattctaaaactatgagatttcatatgctcgtttttcttacagatttgcctccttaattttctttttaaaattcaagctcacatattaaaaatgtagtcgatgctgtttgagcttggaggggaaatggcctattagtgtgcttttgtactgggggatacttatctgagattcatatttaaccatggttaatggacatggggataattcacatgcaaatcatcaaagttaaatatattaagaagaaatctgtcctgaaaacaccatttaattttagaagcattttcttcttttcactacttgaagtatttatagtggaataggcagatgtttttataaaaaggaaatgaaacgacatttggggacagtaataaacatattttggttaattagggatttatactttgtaaaagttttcacattataaatagctaaaacatagctggcctttttaagtggcagtttaaacagctttattgagatataatttacattgtcatagagtccatctacataaagtgtacaatttagtggttttgtgtattcacagagctatgcaaccatgatcatgagcaattttaggacatgttcattatcccaaaaagaaaccccatgttcattatcagttactccccatcccccatgtagttccaaccctaggcaactacttacgtactttttatttctatggtttttctcattctggagattacatagaaatggaatcatatatgaagtggccttttgtgactggcttctttgacttagcatgttttcaagattcatccatgttgtagtgtgtgtgtgtcagtattttattcttgaataatattccatggtattgatatatcatgttggtctatccattcttcagttaatgaacatttgggttgcttttactttttgctatataaataatggtactatgaacattcatatacaagtttttgtgtgaacatatgtttttatttctcttaggtgtatacctaggagtggaattgctgggtaacaatacttaatacttgatggtaactatatttaataattcaagaaattggatataaagcactcttattcaaagtaaaattgcgattttatttaaaactaactacatttctgttttaataaggtatgaattttgtttgtcaaggattttacataaaatctgtctccaaaatggtgtttggcaaaaatcattattaaaatacatgtttttgaacacagcagcttacagactgctattctacatcacagtttatcatcatttatcaaaattgtcatgtcctctgtgacatgtttctttttctgaatattttattgtcacatgtgtcattaagcatttagaaaaaaaatggcctggaatcttcttcctgaactgatgaaattcatgatttttgtgtatagacatttacaaataaattatatgttgttaagaaactaatggtagttttttttcttttaaaattctcacttcaacatcaataaaaaatgtttctgaaatggaaacataccattttgatgtctaactgcatctgacacttttaagttttgctgtcctattattaatattttaaagttttaggaagggctactttttatataatgagattttatattccataaattattatttgactttgttttactttgtcacaatgcttcttcaaagcttttttgccaaattggctacctttagattcctttttaggaaaggtcttcaggatggtcttttttgttgtttttgtttttgtttttgttttttgagacggagtttctctctgtggcccaggctgaagtgtagtggtgcaatttctgctcactgcaacctccgcttccttggttcaacgatttctctgtctcagccttctgagtagctgggattataggcgcccaccactacacctggctatttttttgtatttttagtagagatagggcttcaccatgttggccagactggtctctaactcctgacctcaaaggatctgccagcctcggcctcccaaagtgctgggattacaggtgtgagcctctgtgcccggcccaggatgctcccttttaatagctacttaggaaattaggttttggtaccttgttgttagaagagaatattcctgaaaaaaggaaacaactaaatgcatcgactatctggggtagtagaaagagaagcgacagcacagagaaaagatgccccttagggaggagaaagaaacaaatatcaattagacttgaacgaactaggtttctttattgatgaagaaagttaagccacactttaactttccttgccacactaaaagcaaacaaacaaaccccaaagaatagtcaagcagctgagacattcagtagccttgtaggcaaaacaagacatattcttattgttggagtatagttgtgtaaggcctgtagcccctttcttttgactaatttattccttttggaatgaaaatatttactcaatgcctgtacctgatctgcagactgatcagctgaaatcatccttgattttatttctgatagggagaacctgtcctgcacttaccatggtagagtagtgggtgtttataatgaagatgtaaaactttatagtttggatcatgtgggaggtagactctgatacagggcttagagtgtttattagggagtgctgttggaaacaacacaatggaagagaaaagaatcaggatcagacagatggaagagtcaaggtgtttctttggccaacaacatggaagctttagaactgaaatggttaatcagtttagtgccatgtttggccaaagtggccaggtctttgtaaaccacctccattagtaaatggatgcggctgtcacctcccacccaccagagcatgaccttaggtcaggcgttctctgcagctcagactgttccagcccctaaaggggcttacagctgggattgtcctctgacaacactccctacatctgggccaagaagttcttccttgaggattggtcttgatggtgtttctcctatgtctgctgcactacatcagtcattgtccccttaaccttcacaaaagcttttgaaaatatttatattttttgtttataaaagtggtacaattagacaccaatctgtattcaacagggcaatggttaaatccatgactttggagactatgtgtgctcttgtttgaatgtttctatctcccccagatttatatgttgaaacctgatctccaaagtgatggtattaagaggtaggacctttggaagatgattattagatcatgagggtaaggctctcatgattggattagtgcccttatataaaagggccaacggagcttgtttgtcccttccaggacatgcgaaacgcagtgagaaggaaccatctgtgaggaagtgggccctcactcaatctgctggtaccttgatcttggacctctcagtctccagagccatgagaattgaatttctgctgtttgtaagctacccgtcaacgatattgtcctagatccgcccaaatggacaaagacaatttagaattaacataatgaggaaatctgtgtgtactgatgagaaaatatgtccatcatgtcatagactaaaaaaaccagtttgccgactatacacatatatacactatgattatatttttatttacaaaagctatacaagtatgtaaaatacacaggtacgtgtagattcactaaagcttttaccttctgaagactgggttgggggtaaacaagaagagagaatgatagttttcaatttttgttttgtatgctcagtttatatgttcatttttctgttgctgatgtaacaaattatcacacatttggcttaaagcaacacaaattgtttatctcacagttctggaggtcaaaagtcaaaagtctgtcttactgggctaaaatcaaggtgtcaggagggctgtcttcccttctggaggttcaggggacaatctgttttcctgccttttccagattctagaggctgccttcattccttgacttgtgacttcttcctccatcttaaaagccagcagactcacatcttcaaatctctatctaactctctcttccgcctccatcttccacttcaagaatccttgtaatttcatggggcccacccagataatccaggataatttccttgttttaaggtcacatgattaacaatctaaattccatatgcacctttcttaccacttgccatgtaacataacacattcataggttctagggctttggatgtgaccatgtttggtggggtgttattctgagtactacactaggtaagtgaaactacagctttctcacaacctatgtgctagctgttcatgcttcctgttcagataataccaggtaaatgagagaagagaaacatccgtgggtaaacaattataatttagtacattattattctttaatttctatagtatttataataaagttcaataagaatttatctatgaggaagtggcttttctaaacaagtgtaaagcccccttgtttggaaaaatgtcagagagactgcatactttttcttcttgcccgcttttcccatgctggcctctgttgcagctcttctgaaatgtaatcattgctttatttctttatttatctctttcctaattttcttggaggttctttaagatgggggctatatactttaacttaccaacctattcaatgaatattcattaagtacctattatggctaactatttttctgaacatttgggatatataaattgataaaaaccaataaaaatttcacttctttaatggaggaaagacatcctatatagagggtgatgaatggaaataaactagaacaggtcaagaagaatcacaagtgccaggtttagggattgtttgtaactttaaataggttattagaataggccccattaggatggtgatatttgagtaaaggctttgatgtggtttgggtgtgtccccatccaaatctcatcttgaattgtagttcccataatccccacgtgtcgtgggagggaccctgtgggaggtaattgaatcatgggggttttacctccatgcttttctcttgataatgagtgagttcttgagatctgatagttttctaaggggcttttcctccttttactccacacttctccttcctgctgccatgtgaataatgatgtgtttgcttccccttccaccataattgtaagtttcctgaagcctccctagccatgctgaactgtgagtcatttataaatttcctctataaattacccagtcttgggtatttcttcatagcagcatgagaatggactaatacaggcttggaggagtttaaggagttagtcatggggtgtcagagtacgcttcattaggaagatgctatttgagtaaagactttgaggacttcaaggagttagtcatgtgggcaactacacaactgcattggaggcagagggaacatttactctaaagtccttaaggcaggaaaattccaagactgatcaagtaacagcaggagagcgtgtgcagacgccttgggccaagatgttgaatacatactgaagggagccaagggtgggaggtgatccgagagagtgatttttctggtgtggatcagggtggtagcaatgaacgcgatgtaaactcatcagattgtggatgcgctatacttggaagatagggcaagtaaggtttgtggacaggttggttgtgggatatgacagaaagaggttccaaggatgatttcaaggcttatagtttctctaattggaaggaggaagttgccatcaactgaaataaggaaggctatgatgagcaggtttggtagagaagatcaagagtttgtgttgggcctgttataaagttgagattctataagacttccaagggtagatggtgagaagacaatctccagatatatgaatctggagtttaggaaagaggtctggaatatgtgtaaatatgggagccatcagcacataatagatgctgagtgaacgaagagactgcctgagattatcaaatgaggcatagatggcttgagaatgagactgaggttggagtcctgggtcactctagcagagattagggtaagaagggaaaccaaccaaagagagtaagctggagccctctgcaccctttttgacagcagtaggtagtagatgtttatttagtggataaatgcccaaagaggaggtaaagtagcaaatgacaaaggggaattttatctgtctatgtagaataaattaaaaggtgaaaaacagaatcaactgtatttatctcatcagtgaatgggtaggaagcaagtgatggaaattaacataaaagtagatctgaggccgggcgcggtggctcacgcctgtaatcccagcactttgggaggctgaggcgggcggatctcgaggtcaggagttcgagaccacggtgaaaccccgtctctactaaaaatacaaaaaattagctgggcgcagtggcgggcaactgtagtcccagctactcgggaggctgaggcgggagaacggcatgaacccgggaggcggagcttgcagtgagccgagattgtgccactgcactccagcctgggtgacagagtgagactctgtctcaaaaaaaaaaaaaaaaaaaaaaaaaaagatctgttcctttttactctataaatatatttgtttataaaaataaccgttaattttaataagttaaagtgtttttttcttatgcaattacttctttttaatcttcatgatgcttaatgtgctggtgtggctaattctttgaaaaagtatgtaaaaaaatcccttctctacagagatgaatctagttcttcagattggttattcctatactttttatttgtttttgtttttgtttcagagacagggtcttgctctgttgccctggctggggtgtaatcacagctcactgcagtctcgacctcctgggctcaaggaatcctcctgcctcagtctcctgaatagctgggactacaggggcacactaccacactcagctaatttatttattttttgaagagatgaggtcttgctatgttgcccaggctggtctcgaacttctgggctcaagcaatccccctgcttaggcatcccaaattgttgggattacaggtgtgagccacccatgcttgaccatgtgaatatgaatatactggagaatagcaacactaagtagttgaaactcattttagaaattaccccatgaacatatctaaattcttcataatgagtcatagaagaatttctaaagtcaacttggtaaaatgtactgatgattttcattgaaaaagcatgattttgctttcatatatttaataatttgtagaactttcaactttcactgtggtcttaactggtattaaaggtgatttggaaattgtattgagcatgtatcttgctatagtataaaagaagtagacattttccttaagaactttatattctaggttaaacagttaaaacacttatataaatatacatataaacagtttagttgagaaaatataagatgatgtaattgcaggtctgtttgactcccacctatctcttttgagagaagaatttataaaagaatagactgaaaaagtggcaataactataaacttgcattttgacaggaagaagaatagaaaaggaagcagaatcagctgccttgatatggatacaagttctacaaataggacagccactatgcttgaatagtagtagttcacatacttcacgaagtaaattaaatgtgattatattgggcctgacctgttggtgagaagtggatgtctcagcgtggggaggtgtgtaagcttgctcaggaccaaaaagagccctaggtagtgaaatctttgtgaggggttggaacctgaataggaaatagcatttaacaatgctcatcttaaaaccgaaaacctcagtttttttatgagtatgttaagaatctctgaagatacaacctgggttggacgattacccaagatctgttacatatttaacatcagggaagttatgcaaagcttattattgtttcttgtgtttattttgggtgctgaccttcagaaaggccttagctaatctccaggtcaaagcctatagtgaccacccttgctgccgctgcatgccacacctccctctctgtgctatcttgctgcatttagggactttgttgtcatagttcctctcttactgcaaagggattccaaagctcttgaaaaataggaagtagctcatccttttctatgggctgaggggagcagtccttgatttacgataagaaaattctataatctttggacctttgatagaggtgacaaatacagagatctttcttggaatataatttgtccaaaactattttgagaaagcacacaaggcattaacatttacatttccaattaaagcatagggaaactgtttacaacaaggggacagaagttgatgctgttgtttattgtgttatatgctggttatagaccctcgttttacagttatttctctaaaatgcagtaaaaaaaaaaaagaatgcctagcaacatagcaacctctatgaaatgaggcatatgctgtttctaagactcacaatatgtttttctgaactgtttgctcataaacatgtttattgtaggtgctgcttgggcagggacggctttcctgtagaaatcctctcttgaatacactaggttctggttcctcttgtggaagaatgaagctctttttgactgccttggaaaatttgatactttcaggtatttatgacataatcaatggctgatatgtgtcttcaggatttatgactgtcctgtcataaattgccgtagtttcagagtgcatacaacatcactgtctttttattactgttattattggagacaggctgtcactgtgttgcccaggctggagggcagtggcgaggtcttggcttattgtaacctcctccttgccagctcaagccatcctcccaccttagactctcgagtaggtgggactataggagtgtgccaccatgccttgctaattttttaaaaaacatttttgtagaaatgaggttttaccatgttgcccaggctggtctcgaactcctgagctcaagggacccacccacctcagcctcctaaagtactgggattacaggtgtaaaccattgtgcccagcccactctgtcttttgaggtggtgggaaggtgagatgtagtgacacagatattctgtgtaccatagtgataccttatttatgaatcatcttgctctctctcttgaagtctctctatgctagaaacatcatctgatgtggtattcgacacgggttcaccttctggttttgtcactaaatgctttatgactttgatctcagcccttctctgtgtctagagaattgttaaattactaaattaaaatgaatttttgagagtcttttgatgtcacaaaatgtaatagctgctgagtgcccaagtatatatcaatttttctttagtgaagaagatgcagaagtggtaaaggagaggctgcttttggagagggcagagtgagaggagatggaagtttggaaatatgtcttataaggaaggccaatgaggaggcaatcattctgtaacatgtacttgtgatctagtaaagcttgtgttttgtatagaaggctatgtaggcttttatgactgggaacgtgtgaaaataatgacctagagccaatggggcatagggacatttgcggcatctaacccaggtctttttcattcccaggctagggggctacaattctcttctgaaagttacttggcatgatcatcttgctgttcttaaagcaaaatagcccaaattttgttgaagaaatgttttagagaaatgattgcctcatatttctaacaccactcttggttatttgtttactaaatagctttttattgggggaaaagtgtatggaaatttaagttggggaaattacttgggagaacttcttaatgtattagtctgttcttgcactgctataaagaattacttgaaactgagtaatttacgaagcaaagaggtttaattgactcacagttctgcaggctgtacaggaagcatggttggggagccctcaggaaacttacaagcatggcagaaggatgaagaggaagcaagcaccttcttcacattggcagagcaggaggaagagagtaaaaggagaagtgctacacacttttatttatttatttttttgaggcagagtctcactctgtcacccaggctggagtgcagtggtgcgattttggctcgctgcaccctctgcctctcaggttcaagtgattcttatgcctcagcctcccgagtaggtgggattagaggcatgcaccaccacgctaggctactgtttatatttttagtaaatacggggttttgccctgttggcgaggctgatctcaaactcctggccttaagtgatctgcctgcagtggcctcccaaagtgctgggattgcaagcgtgagccaccatgctcggcctacacacttttaaatcttttaaataaccagatctcatgagaactcactcactatcacaagaacaacaagggggaaatccacttccatgacccaatcacttcccaccagatccctgtcccaacattggggattacaattcaacatgagatttgggtagggacacagagccaaaccatattactgaggaacaacttaatgtagatagtttctgtgtatgtgtgagaataaagttttcttataaaccattctattttttaagttcaactattttatcttccttaaagataggggggttgaaagttgattttatagtttgagctcttgttatttttcaaccattagccaataaatataagtggcaattatttaagaagaataacataataatcaaatatgagaaatataagaagcttagaattgtggagttggaagggacaagtcacctcaatttatagtcagcatttatctaattgttctgccccccttaactgtaaaatggcaaaagtaatacttgatccataaatttcttttaaggattaaaagataatggattaaaagataatgtatacattcaaaaatattttttaagtgttttgtttgtttggtttgttttttcaagacaaagtcttactctgtcgcccaggctggagtgcagtggtgctatcttggctcactgcaacctccgcctcactggttcaagcattctcctccctcagcctcccaagtagctgggattacaggcatgtgccatcatgtccagctaatttttgcatttttaatagagacagggtttcaccatgttggccaggctggtctcgaactcctgacgtcaagtgatctgcctgccttggtctcccaaagtgctgggattacaggcgtgagccacagcacttggtctattgagtgtttagtatgtgccaaggcatatgctggttcagaggatatatctgtgtactagaaagaagatcctggctttactaactaggagggaaaaaaactttacccggtgatgacaaaggtgataagtacttccacagtgctcactgggacaaagtgtcagaccttacacagtacctgatactaggggagaaagagggatggacctgatgtgtcttgggtgtaaagtatacccattatataatcctaacagcaattctgtaaacctggtcttattttccttccttttacagatgagcaaacttgtgttcttgtaggtctgtgtcaagtaatgtttgttaaataagttaatgtgtaaatggaaacctgagcagttgtgcaacatgcccaaattcttcagcaagttagtgacagctgggaccagagctgtttctgacttcagcccaggggtcctttcattattctacactgcctctcagagtgtgcataggtgtgtgtgtgtatgcatgggagataggaaagttgcagtcttatatatgctacacttatcaatataaaaattatttcacaaaacacaaataatagtgaagtcagggctcctagtttaatccattttaattcctatcactagttacaggtatatttaattatccagatacgttgactttgtgctgtggatttagtgtactaaataacaggatccaaatctgtgaagttttctttttctggaaaactactggctctgaagcaatttaagccagaattcaaggccattcatccaaaatttaaggtgttctgaaatagaaggtgtatatatcactttacttaatgtgtgggttgtgtgggagacttttctttgcaaattgaatcattggagaccaatgatcctataactgcatttgaaatccttcagctggcaaacctttggtagttttaatttctttctcaaagaaaacatctgttataggtgtctgtagtctagttgtgtgtgggctaccatttcaattagtaaagctataatgacagtcttgggattttgtagaaaccctagtaatagatagaagtgaacatttctaatcctttattatgatcccgttatcaatttcaagtcagtttcttccctatgccatctatccaccaactcccagctgtcttgaaagaacatatataatatttttctaactttagggaatttcttttaagtttgagggcctctttctttttgctaggaagggaagccgggtcaggaaagcagaggagttagttttggagggccctccttttgtgcatcatttagttgcagacctaagcaatgtctttaatcccaaggaaatgatacaacactcctggagtcttccacggttttcagaaggtgagtattcactaacagtacctaactctgtcccttctgtaatttatgtggactctaaacattgctgtaaagtactgctggagaaatacaagacttgtacatttttcttttcttttcttctttccttccttccttccttctctttctctctttctttcttttttttttttgatggagtttcactctttgttgcccaggctggagtacagtggcacttaaaagtcaacctgaatcgcatttttctccagtctgcaatagtttgcccaaataattacagttttaagtcttttaaatggttactagtccttccagcacagaaaggtgatgcagccccaaataatgtgtatgtcggtactgtcactacagtgctttgggtcgaccaatctcatcctgacttctgatctggagtctactgtcatagaaaggtataatatgcttataatttttctcccccaatatttctttgcttctctgtggcagtatttctcccccaaaacacttagagatgtttgattttatccttgcagctgttataaggcagacaagctcgagctgacacacacagtttctctcatgacaaggaccaattgtgatttatgaccatttacaggatgctagtgatgtggggaagggtgtgtttttagctagcaaggctatgtcctttcacttggaaataaacaacatgttaaaaatatgtagcagggttaaaaagaggaagcttcactgtaattttcgtttagtgaagagcccttaggctaactttctataatgttcagctaatgtgtttatatcttcaaatcatcttaacaaatatttattgactgcctgcttcttgcaaggtgttatgctggctgaaatgaaagttttcatgaaaattctaatgtatagaattaggaagttagaaagcggggttattagcatgggtctttgtctgctttagttgaatagaacctgttatgaagcaatacattttcctccaaaaatttggcttctttagcaagcagcatatcaactaaagatgaaagaaagaagtggaaacatttattcacttgtaatgttaatataaatctttgttttcatcagaaattcctgaaaagctagattataatatgttacagtacaaccttgggtttggcttttagcaccaaggttaaacaaagatttatgaacacaaaagatgctgtgaaagctcagattcctgctaaaccttgaatgtcctatagtcctctaaatggtcctaaatgtggaaaaatcagtcttctcattggttaggacccactgacttccgtcattgtaattactgtgatataacctgtagggtatgagtgattaaataatttaatatcactgggagagttacttattatgtgttttatttgtatatttgcaagcagttcttcatttctcatgacagttcttgcattcatcatttactaaaatggggttctgagttaataacatttttttcctcattataaaaattctcagaacaagtcaagatctaattagacatcttcaatttattaaatcagacctctttacagagcccttttagaagcccaggtaacacttgttgttttaaatcactggcccaacatagtcacatgaatataccttgatgcaaagaagacggtgaagatgtaattttttagcctttgcatattaaaaaaaatcagaattctgatagtaagaaaaacatattgtttagttgcccaagttgtgtctttttctccacctctgatttcttcccaatactttgatgaagtactctgatgaagtactcccaatactctggcgattttctttttcttacccactataaagtgtggtgtttgcacttcatgcctgagtctttctttctgagaagaggctcctgcaagtctttggcagctttcaactacattaattttacaggtccatccttgaagcaaaactttaaaaaggtattttatgcttttttccttcctttttttaaaaaaaaaatttttcaccttttaattgtcagttctaattatctgtgcaaactgattcaggcagaaacatacaattctgagagaaaaagggaccctgggactgacaacctaggtttactgagtgggagaggcagaggtgcttcccaaataaaaactgtggctgttaccagaagaagggaacagggatgctggaaaaagaaaggacagacatccagttctggaaggtttatttggcttttattcataaaaatacgaaaacctttccttggttttctgctcttaatcttcctttaaatacatcaactagacatagtcgatataggtggttcttgtaagataaaacctccttggccccatgcaggtactctcctgatatttatacacagaattgcccatgtctcttaaaaaagagaacatctgatttgcctttaagaaaaatgtgcaggatggggtgggaatgagggtgggtgagggctttacatttcatgcagttgcagactttttggaggcagcttttactctctgggtcatattttaattcctgatcctgaagtggaggggaatcctgatgttagtgtctgggtggtattcttgatagacttttagttgaataagtaaggaaggatgcttacatgaacaaaccttattcagtgtcccagtttctgagcagcccaaggcaccaaagcctaacctaggatgaggatggtttgtgtggagctggtgaaactacagctcccgatctcatccaagattgttgttttccatttgctgctgaacagctgtttgtttggctttccagcggcatgaatatgcccacataatcacaaactcctagatattgaggcatcttaatgagaacatagcctgattttggaaggaatggaatgaaggaggccaagtgaattgcatcagggtgcctggtagaaaaactggcattagaacctcgattctatgctcactgtccgtgctctgctccagtacatgaaatttgtcagagaaaatgagatgaagcaccatggtttcctatgccctccctgtttgttcctggtacttaaccaacctaaaatctactcatggatctgtcaggttttagatttagtaacaggctcattgactatggaaataattgggtgggggctgaggtctttatggtagattcaagtaactagagcaagagtagatgggttattgtggtagaatgagggacatttgctagtttaaatcacatttctgcagtttgtggttggacttggagcttctttttctctgtagcttagtagcagatgcgcttttcgctgctggagcaaaactacctacagtagtgtgaatcagcaagtagggagtattattagtcatgtgaattcagatacttcctattgccaaaggcttgatatattcatatcttacattttatcttctctgtgacgattcattacatgtagtgagagcatatacttagtcttctgtgtggctcaactgggggcacatttggtctagtccaagtaattatatgtaacgtaaaattacatacagcacagtcatcaaagaagctgtccttccttcccctatcactaagatctagggtgactctggagtgccactgtgtgaacatttctcactcttgtgagcatgtttctaaatcccaaatcaatctgacaaaggattttctgtgaatttcttgttaatttcttgacataaaagctcttatgaacatacatattccgaacttaattctttgtttgagtcaaaatcatttttattcaagagggaacaattatattaatctagatttgcctggtaaatccataacatacagacctgaagttcaagcagaacccgaggtaatgtgagccctgggtaaggtatagtaaggatggagaggtaggtaaagaaaggcgagaatgattcatttattgagaaagatgagcaaggtggtcaaatagatttgcttctcaacaaagcgtgtagtttaagcacttagttttggtttcttttgaagctgccttccctttttcccatctctctattccaacataacagaaaaagaaggaaaaaaaatcaatacaaaacaaccatttacttatttcccagagtaatgcttctcaaactttagcaatgtgcatgcaaatcacctggcaatcttgtaaagtgcagattctgattcagtagtggtcaggcagtgattctcaaagagtgttccttggagcagccttgttggaacaactgtgagcttattagaactgtaaatttatgagccccacctaacctattgagttacaattttattagatgggcccaaaaagtgttttaggaagcttaccaggtgattcttattcacctgaaagtttgagaatcactgacatagaggagattctctggagtttttctcaggactctggtattttctactgtcactgggcttacagtatacagttgatctttagcagtggaaacagttggacagagatctttatttaggctcctgaatggctgtcggcatcttgaaagttgactggcttcattaaagtctctatttcttggtcctttgacatctattatgataaccctgatactttctaaagcagacatgccacttcatggaatcacgcacctcatggaattccatgcacttcatggattcatgcacgttagcacagctagacacctttatgtggcaattgggtaatacttactttaaaagatagaataaaggaaaaactacctaaaatttcccataacatttttttttttttgcagacttttcaggggtatggatactatatgggctttatatcttcatatcagcttagtcctagttaattgttattttcaatcatattaatggccattggtcattgctagccagtatctatgactggctggttctaatggctacaagcatgcttagcagtgccctcatgaatgttgctattattgttgaaggaggaaaacattttaataattggaattggattttctcagtattcagtattgcaaaaggtggatgtaacttcttatgatgtctcaacagctattactttattttttaatttatttttaaaaatcttattgtcacaccccatgattctgcaacagctataattttaatttctgaaagttttgatgatttcctccaaggctatagctggagaaatgtacattgtctattattagtaacatttctcaaattgtttacaaggcctgcagtatagatgggctgagactgtgtttatgctttttcattgagaaattttggtcttgcagaaggaatccatttgttctgtgaatctctataaagcaaagagaagagttcaaaatttataagggagcccaacaagtgttccaaaaaaggctatttaggcacaacatttaggtgcttatctagtatgttgtttctatcaatacatagcttaaatataaatagatctaagaaccttagttaagacgaaagggtatagcataccatgctataaaatctgtcatacagaatacacataaagtgtctgctgtaattttgtaatctttccaaaagcaatatactgtgtctacagccctcatttacaacttatagaaatttactcattttatgcagaaaattggaaaggagcagatgtttattcctaagctagaattttgaaggccaacaattaaaataaacatgtctctgccaaaacttgaactaaattgaaaaatttagcatataaattaaagctcacttaaaactaaatttatcaaggaaatacatttgttttgcattgctggtttcaattattctgaaaggacttttatttttatggaacactgaagatttttaaaagtttcaaacaatttattggacaattgcaccatttaaaatgagttacaaatgtcttgcttaaatgtatgagctattagcacatagttgatgaccttatagagagacattaaagcaaccatatcctcaagtttatgtctatattcccaggggagtacaagaaactggtctgtagacctgaaatagataaagctgtgggcagcattctcttctattcatttgttcctttggtcaggaatctgaattttgagacatattcaataaattatgcatactcaaatatttgtgctcttagcttattgccacagaggaaaagagattatttcctactttttagtatctctctgcttttgtctgatttgtacaatgttgcctaattaatttttcttaaacactttgccctccacacattttgcctaaaaccttcattggctcttgtaagatgtgctagcattctagggtctcagtttactgttgctaccctacttaaatgaatctccaatgcttcctaattgttacttcttggcttcaaccaatccaatgagtttcctttctctgacacatatcagatttatgcaaagtagtttcttggcttaagttgccctatatttctacaaaggtctagtcagatggtcagatgtgactatctctacatatgggtctgaaatctagtttaggaattctatgctgtgaatgttttagcttaaaactctaaaatttaactagttttttgaattctctctattatattacatgcttctggaataaatataaacacaatgaaatcctttcttgaaaatttaggaagatgttatacacaatataaataagttgtaagatagtgatttctactagacagttaaggtattaaggactatttgtccttgtattaaatggacccaggctatgcctttctagtgtttttgtatactctgattttttagtggctttccattaaatcctgaaagctcactactaagactcatgacattttttggggggttagaaaaattactatgattcagggctgggcgcggtggctcatgcctgtaatcccagcactttgggaggctgaggcaggcggatcatgaggtcaggagatcgagaccatcctggctaacacggtgaaaacccgtctctactaaaaatacaaaaaattagccaggcgtggtggcgggcgcctgtagtcccagctactcgggaggctgaggcaggagaatggcgtgaacctgggaggtggagcttgcagtgagccgagatagtgccactgcactccagcctgggcgacagagtgagactccgtctaaaaaaaaaaaaaaaaaaagaaattacttactatgattctctctctcaaataaaattctggtgacttttctttaactcaccaaaagtagatacatacatatttctaattcattgtttgaagaaaagccttaagatattttgaaataaaattctacacacattacacagaacttgtagctacatgaggagagcaaggtttttttgttttgttttgttttgtttttgagacggagtctctgtctgttgccaggctggagtgcagtggcgcgatctcggctgactgcaacctctgccccgccgggttcaagcgattctcctgcctcagccttccgagtagctggaagtacagtcgtgcgccaccacacgcagctagttttttatttttatttttatttttagtagagttggggtttcaccatgttggccaggatggtctccatctcctgaccttgtgatccacctgctttggcctcccaaagtgctgggattacaggcgtgagccaccgcgccccagcctgtttttgtttttattttgtaaaacggccttctccacgctgaaactctctctcttttgctctttcatctgtcatctcctccccactcccacaccccacactcctttacccaatcttgccactgcaggacaagagataggatgaaagttggaaaataataatttatggagaaagcctgtgttccttgctttatgaaagtaaattgtagataattaatgttgtgacaagatgattctattttgatgaataaaatcattgaaaagctatcaagccccactgtttctctgctgagagaactttttttcctctctgttctgcattcctattcttggctttcttcccaattagtctctgctaaagagtgataattggggagataggattttcacctaccttgtgaacagtaaaaatacccatttttccaccactgaagctatgtgtattaatattctatgctttcagaaagaaaatcccacactactgtgattcctgcttaaaaaaggaggtaatctaatgcccaagtaaaaacaattttatggtacttttatgagcttctgggaacaatggccatgtgatgttcagttgcgtgtttcatgtctgatgactgagttcacgtacgtcttagaggctaaatttggtttaaaatatcttacatcttctcaaattccttataacaagagcagtaaattaaaattaaatttcgaccttaaatggattgcatgttttccatttgtaatatattcgtatggttcaaaaatctgaaagagtaaatgagtacatagtaagagatttccttcctacatccccatcttcccagctccttttactccccctcccttctgcatgaaaactactgttactagttttttatgtgtccttccagagttttttctgcatatacaaacctaaaataaacatagattcttattctcctactttttacaaaaaatgtagcacattttataaatattttgcctcttgatttttttcttgcttaacataatatagagttatttccatatatacatacatagggacatttcttaatttttttatagctgcatatcatttccttgcactgaagtaccataatatatgtatatttcacaattacctgattcatgtatatttgactagtttcaaatcttttgatattataaacaatactgcaaagaatattatatatgcataattttatacagtaggataatttcccagtattggaattgctaggttagagtacaagtttatgaatgttgatcagcattgtcaaattgcccttgtatagggattgtgcttagttcggctcttaccaggcttatatgagattgttcctttttcctcagccttaccaatagagcatgttgtcagcctttggcattttgccaatgtgataaatacaaaataatacattagcaaatttttaacctgtgcttttcttattatgagtgaagtaacatattttcatatatttgagtgatgttcctctatacatgatttgtatcttttatttttttcaacattcaaatattttattgttgatctttttattatttatttctataggcttcatctaaattgcaccttttcctgtgatataaagtaaaaaatgtttcagaattatatcatttgtattttgactctgagtatcatctttttttctatttttgtttttttgtttgttattttctgaagaattggttgaatttttctagttcatttttcttcgtggcttctggatttttagtcataattagaaaaggctttccccttccaagattataaaggaaatctcctgggattttttgtacttttgtattatctttaatatcacataaatctctgattcatctggaattggcttgtagtaagaagtttattttttctttatatgacttaattattgaattgactatctttttcccactgatgtaagatattacccttattatacactaaattcttctctatgttgagcaatagttttgaattttctgttcaatctctttggtctgtttatttatgtgccagtattcagggactatatgttttaacatctagaatttctaaactacctttaataactgaaattgctaagctgttttcctatttaaaagtttttctgaatattcttttcttcttttttctttataaacttccagattaacttgttttattcaaacagctggtgttttaaaaatagaattttattacattttcaaattaaattgctgtctttatgatctcgaaatttattctcaaaattatgatattactttttcagttgtgtaattccctttgtttcctctaatggtgctttaaatcatcatataaatcttgcacatcaactttatcagctttatctcttggtattctatctttttcatcactgttgttagtgatttctatatgttgattttgaattctattttactcatcttttattgcttgtagttgtttttcagttaattatcttttatcttccaggtgtataatcatagcttctgtagtaaataattcctttgttttcctctttccaaatttgtatagatttaatttggttgtaactcgtctaatcgctttggattgtacctagagatcagctttaaattttatcagtgatcatctttttcttgtttctgacttctgggattctaaaattttgtcataaagcatgataatggtttttggtctcggttggctgtattttattacgttaatgaagtatccatctgtacagtcctagagttgtagctggacctgtgaacaccaccttaagacacgcatttctcagccccgcttgtatttaagccttacttgtatcacctagtgattcatgtgtgcccatgttcttgccattgtaacgtaagtaaaagtgatacttgccatttcttccacatcctttcttttcccttcttgctggcaggaaaccagaagtgatggcaacccagcctcaactatgtaaaggacaacaaggccttcagggatggctgaccatgagatggagggaacctgggtcccagaatcacttcgtggaacagactactcccctgaacaacaacttccgattattacttgagaaagaaaaataaacataattgtttttttttttttttttgagacggagtctcgctctggcgcccaggctggagtgcagtggcgggatctcggctcactgcaagctccgcctcccgggttcacgccattctcctgcctcagcctcccaagtagctgggactacaggcgcccgccactacgcccggctaattttttgtatttttagtagagacggggtttcaccgttttagccgggatggtctcgatctcctgacctcgtgatccgcccgcctcggcctcccaaagtgctgggattacaggcgtgagccaccgcgcccggccaacataattgtttttaaagccattttattgttgagttttttgttacacaaagccctttattaccatgactccacatttatagttgacccttgaacaatggggttagagggttaggggcaccaaaccccagtgctgttgaaaatctgcatataatttttgactcaccaaaaacttaagtactaatagtctacttttgactggaagccatactgataacctaaatagccaatcaacacacatatttcatgtattcatgacacacgtttttcttaaatttttctatatttctagtctgcacagcaaatctccaagcaatttttatgtatatttattttttaaaatctgcataaaagtggatttttggagttcagacccatgttgttcaaggttcaactgtagtccttttttttttaggtgattttttatttaatcaaatgatttatttttttttaatcaagtgatttttttttttggtcaaaaacctttttcatctatggaaattatcttgtgctgtatctctagatatattcatataaattatattaatggttttacaatatttgaccattcttgctttccctggaataagtcacatttcatataacgaattatttgttcaagtgcttctgggaatgtttcaccgatattcatacctaagattcgtcagctgtttttgtttcctgcagtctttataaagttttgatattagtgttactcttttttgtagaggaaagaataattttttaaaatttttccttgttctggggctattttaaaatgctggaattcactgttctttaaaaatgtggtagaattttcctagaaaacttccaaggccagaggtttcagagtattaataattggcacatttctctaattcatttgttgaaatcagattatttagagtttctatatcctttggggtcagttttggtgaattatacattactagaaaattacatatctcatccagattaaatttattttggcatagagctgaataaaatagtctcttttggcttttttatttttctttgtttttgtggctttttaaattcttattttcatgtttgtagtttgttcatatttccttgaatagtttagctgtgcttcatacattaaatatttttcttaaaaaataatttttaaaatgtatttattctattttttccctaactccataaatattaactaccctcttctccttttccattgattttttgttcttttctataaatttcattcagaaactcaatttccttattttctttattcttttaaattttttaataaaaattaaatgctctgagttttcctttgagcagtgctttagctatagctcatgaattcaggtatgatgtttccattaatattatatattcagatatatcagattgcataactctttgaagagggaattgttttggagggggttttaaaattaccatgagaaaatttttatttttctccagttttatcaatttctatatttaatgtatcatattaagagtatgttttcgctgttatttctagaatttgcctatttctgaaattttctttatagcctcatatgttatcaattttaataaatattccataaatccataaatatggattgttgaaaagaagataggtctttttatttctaatataaagtatttttggtatatcaaacatccataacacattaatgatgctactctattctcatagcttgagagaagagaattactctcttctcactagtgtgtttctgtctcttatttcctgtaatttcaggtttgtgaacattttgctattcataacaattttttgtgaattacactctcttgagttatacaatgttgttttttgcatcattttgggcctaaattcttgcttgtctaatatgaaaaataagaccatctacttggattcttttctgttttgccagtatatctttttccacattttaattttaattattgtgaatcagtttgttctagctattcttttaaacagtattgagcttggttttactttctcattcaatctaaatatctttgattttaacaagtaaatttaattgattgatactgatatagcaggtatgtttgttctgagtgctgccatatgttaaattttttgctttcatgtttgctttatgttctttaacagtctttcattatgttgtctgtgtacttccctttgttttaagtatacttctgatatgtgtgaaggtgacatatttattctattggctatctttataatttagttgttaaccttttgtaaactatgtttgtacttctatcagtttttttgatctgctttaatgatattacttgatttccaggaattttagtaaaataatcaacaaacattttcaacttcctaatttcttttcccctccttcgcatttttaaaaattttaccagttctgcttggcagagcacataatattaacattcttttttggtcatcccaaccctcaaatcttttctattatttccccagtcatatttatttggctgaagaccacctactactgtcgtcaagaaagattaaatcatttttgtaagtaaaagctgtttgttgcctttattcctaaaggacaacttgactcaaactttctttttctgaggatcttgtagatggtgctgttaatacatgttttatggtgttaaatgcaactgtagagaaatctgattttcatgcttataagtaatttactgtttttgctggactaccttacatattctttctttaccatttgaagttcaataactgtctgggttgtctacactgggttagtttttccttgcctccagtgtacctttcaatatgtatagtattattttatttcaaagacttttggggagcttatatctttaagttgtctttatgtctctctgtttttcctttttaagtactctgtcttcttctgttaaggctgctatcacaaattatcataatctaagtggcttatgaacaacagaaatttatttcttacagttctggaggctgagaagtctaagatcaaggtactggcagatctgtgtctggtgagggctgcttcctggttcatagattctgtcttttcactgtatcctcacgtaatggaaggagcaaagaaaccttcgggttctcttttatgagggcggtagtcccatgcttaaaggctctgcccacatgacctaatcacctcccaaaggtcccatctcctaataccatcaccttggaagttagggtttaacataggaattttagagggacataaatagcacactccaaatacgtttgttgtatctactttgcctgtcttctgtatccgtcatctagtctctcattcttttcaagtctttattttcattttattttgttctcctttttttaattagcctttatgttccttattctattttctgtagcttttttttatcatttctgtgatttcacgctattatttcttgagctctgacaggttatatttgagcatttcctcttgacttcctgtttcttcttcatgatcttttttttttttttttttttttttttttttgatggagtctcactctgacacccaggctggagtacagtggtgcattctcagcagctcactgcaacctctgcctcccaggttcaagcgattctcctgcctcagcctcccaagtagctgggactataggcacgtgccaccacatccggctaattttttgtatttttagtagagaaggggtttcaccatgttagccatgatggtctcgatctcctgaccttgtaatccacctgcctcggcctcccaaagtgctgggattacaggtgtgagccactgcgcccagcccatgatctttcttttaaaggcagttgcttcatttattttacaaaactaatgacaaaaattttggttagacttttcattctgtcattgaagaaattcttgtgctctttgtctgttggtaagtgttactgctcttttttttcttatagtaaccgcatatcagtgttgttccatctcctttgctaatgctcaatactgaatgaattgggtcttcatgccttaggtatattagcagaggtgtttgtgaggtgggaagatctaggcagtcttctaaacttcacatctgaaaggtgttctcattaggtggttccacagagacagtgtacttgctgctaatatggccccttcttcaatctgtctgtctattatgaatcaatcaatcaatcaatcaatcagtcatctctctgtccatccatccacccatccatccatccatccatccatccatccatccatccatccttctttcttttctgcctctctagtctaaactgtatttaggaggcttcagcagccagccctactcactgccatactccttctaatttttttttttttttttttttttttgagacggagtctcgctttgtcgcccaggatggagtgcagtggtgggatctccactcactgcaggctccacctcccgggttcacgccattctcctgcctcagcctcccgagtagctgggactacaggcgcccaccaccaagcccggctaattttttgtatttttagtgtagacggggtttcactgtgttagtcaggatggtctcgatctcctgacctcgtgatccgccggcctcggcctcccaaagtgctgggattacaggtatgagccaccacgcctggccactccttctaatttttaacacatggtgaggtgttgcatattggtatattctactgttattgtaacttcttttccatggtggtgtatttttgttggtattttctgagaactgttaatggtaagctacttaacctcactcttcacttcattttctccttaatttatttccttttgcttctatcagacctttgccctattgacaggatagttgagtataccaaaaatacaattttagcattgcagggtgccacacatgttgagaaaatatttttgccagtgtctttggaaatttgcccttgaagaaccaactattctctgtttctttttttttttttttttttttttttttttttttttttttttttttttttttttgagacggagtctcgctctgtcgcccaggtcggactgcggactgcagtggcgcaatctcggctcactgcaagctccgcttcccgggttcacgccattctcctgcctcagcctcccgagtagctgggactacaggcgcccgccaccgcgcccggctaattttttgtatttttagtagagatggggtttcaccttgttagccaggatggtctcgatctcctgacctcatgatccacccgcctcggcctcccaaagtgctgggattacaggcgtgagccaccgcgcccggcctttctctgtttctttataatgatttttctgtacaatatcagttgcctttgggagactatgtatgcttggaagtgtgaacattatatctgttctaacttttatgattaaggagtttatttttttcctcatttttttcttttctttgttgcttttgtgtaatacccagcaagtggaaggttatttattctgatgccttgtttgtactgtaatttgaaaactgacattttgggataattttatttattttattaagattttttttgtattggtggtcatgtatgtagtttaaaatgaagtgtggatttttaggctataaaattagccagggtttagaatggtaaggtggataaagcacatttactttttttcctccatttttccttttgaatcctgatgagtattatctagttttcatttttggtaagttctccacattcatggactgctttgttactattctgaccataaaatgcttgaatttagagttctatgtgagaaaagtgatccttgttgtgctgttatgactaagcatattgtataccacagttaggaaataaaaagcactttgcttcctgagataaatcatctatatgcatctatccatgtatctatcaattcatctatctatctgtctatcaccttatctagtactattccctcaaattaaggaaggcttgagctctttcttataagttgctaactctctcattgaaataattcattccctgaattttgcaaaactgacatccataaatttgtgatgacccttgaagatatgattaaaaaatgaagaaactgttctaccatgaataggctaattgtaactttagtagccttgtgatttttttttctctaaatacccgctgtgtccatttgtcaaagatccttgcaaatatttaaattttgcatataaaaaatacctttcaaagaatatttttatgtctgcatttttcttttaccagtgacatttcactgatcatagaaatgaaacccagagttattgctatatttatgaaaggatgaatgtataattgattaaggagatctatttaatataaagcttataattagggtcatgataaagtcttgaattgtaaatatatgttgtatttattgaatagaatgcaattagagaatacaaacctataaaatatgtaatattagaggtggaaacaagacaaagtttctttgacaaaaaggtgcatgtacatagatttaggtcagagattgactaatgcttaaaaataaagaaaaaatgaatcaatttaattgagataaatgatccatgattaggataagagaaagtctagctattcaattcagagttcacttgaatgcatgggctgctgtcaagtttttaataaaagtacagagcagcttcctaacagaggtatgaataataagtttatatgtctctgaaacaatgttaatataattgaatcaaagaaataattaaatgtataatagtcttctatttaaatttgttcttaacagtgcaatttcttatttaaattctgtattatgaatttaattatttttgtcaagattttaaaaaatcattattataaccagttggcaccataattacttttagggaaggaactgtgttgggtgcggggagcaaaacttggtaagtcacttgggattaaaggtgtgggactttgaggatagagcctccgtaacaggataagttattctacatgagaaaatgggaagtgtttattttgaactactatatggattgggattggaggctgaaggcagtcttctaggtatcaaagggcagggaggttttacctgacatatgaattattgtttcatgtaaatatagttgaaagtcatatatatttagaattttaaatacatagtttcaagacagtgcttttaattttttaagaaaatatgtgtcatttattttttccaaagctagtggaagtttctttgtgtcctaatagcaattgcgtgaatgaaatcgacatgaataatacttccagttagattttcataaactgacagatagtttcataaatacccaatatgtaatgatagtcagagggagaagctatattaagtgtgtatttcaggagagattgtcctctggagcatatactagcatcaggcagctgctttatggaaccacccaccaattcccttgggttgttgttattattgtttgttttttgtattttgtttagtttctagggaacataattttctttgtgtttctttttgcatgatgctgaccaagtcatgttcataaatcacatatgttgatatctacagtgctttcattggccttccaactcgagcatggcaaaatatgcttattttccttcagaagcgcatctttgtgttaactaggcattaacaatatgtgcttaatagcaattatcttatttctaaggatctcagagttggtttggcacattgcctcagtgctcttcaaacattatcagagaaggacaacataaacaataagatttacactgtaaaattagcctccacttacaaattcttttatcagccaatccttatcttaataacatatattaccttttattaaagtaaatatgtccctcagctctagcttttttctctgtatttttatgtacatttatggagttttactgaaatatttagaagactactgtctaaatacggttctaatttttaaaatgcataatctttagggtaaagtcttggagagtggcaagtttaatcaaacagtaacgctatcagagataaagatcataactcgcattaaattctataatttaaaataaactatgtctggtatgtattcagaaaatgtcagagctagaacatttagttcagtctctatttcatgggttaaagaaaagaaagcttagaacagtgaaaatacttcctcaaggtaatacttacagttcatggctgaagtggtaataaaagtcacaaccaactttttcctctctgctttcttttctttctgttctgtcattttaagtttcttaaaggaaaagcttagagaaaattaagtattgatgatagagcagatacaggattttcaccgggtgcagtggcttacgcctgtaatcctagcacactgggaggctgaggcaggtggatcacttgaggtcaggagtttgagacaagcctggccaatatggtgaaaccctgtgtctactaaaaaaacaaaaatttgctgagtgtgatggtgcacacctgtaatccctgctactcgggaggctgagccaggagaatcacttgaacccaggaggtggtggctgcagtgagccaagatggcactactgcactccagcctgggcgacagaatgagactccatctcgacattaaaaaaaaaaaaaaaaagaaaaacaaaaaaaggattgtgttaacatgggggcctgggtgagaagagaaaatttatttataggaggacatgtaggaagggcactgaagattactgtttaccattttgaattgtccctgctccagtcttacaaagtgggacatgcattgtgtttcttgggcatactcacttccctaagaataagctgtatcatccaatgctatttgcacagaactcacggctttatatttactgtcctaaaataagtgatttacaatcttttaaactttaaaacagtaaatttgattttcagcgatgcctttttttttgtcattttaaggccccctccaaagtgttgtaacctagctgaatgaaaaataagtggcatttttgttgttattgttggtgatgatacttttcatggcaatctttgagatacctaggaatattccaagtttttgaaaaatcatggttgggaattaccactctggaaacagattgccatggttactgtgttaatgctgtgattaatgcgtcttttagtcttgtatgtgtgtgtagatgtagacataattctatattctagtttggttaacatgtttgatctttttctatcagtcagagacataaaaatgtcttgactctcttaaaaacaagactgttcccattttttaacctaatggatatttgttgctgaggatcatttttttgtaaggagtgaaatacccagaaaactaaagtggtctagaagataactgctagttctacatttttttttttgtctgaagttgtgtttgaatttacttcctttcatcacttagtattaaaagaacagtgtgtcaattatagataagaattctacatcccctgtctttccctaagtacctgcttcgaaaaatgggtgcaactagactcagtagctagatgtggtatgtggaatgtggattcgttcgtatcaggcatgcttcttataggaatcctttaatgcactcagtcacccagagcagtcaaaggcctaagctgcttcatactttatagcagggcacagtcacttccataaatactgtgcactcccaagtaaatccagaatgtttgcaacaggatttgtgtaccatccccaattctctgttttcttcaataaagtctttgtacacaattgtttgattgtttttatctcttgatactcacaaataatgccactggagaaataaacctaagacatatccaactggatcactttatatacagagatataacatttcaacaacagaagcctttcttgttgaggggatgcacatttggaatactctcaaatgattattcgaaatcaagaaaaagagccaatgagaaacagcaaaacacaaatatctctaataaggaaaaatatttctgcaatgagatttttcttagatatatatgtgatgattaagagcatttgtttatattgtaggttcttgtcctaaacttacaatagtaagtgtagacaacactaattgttatggtaaaaggtgctacatgtgtgtatgtatgtatatgtgtatgtatatgtatacatatattatttggatattccagtcagtggtacttactgcccttggttaatgcataattgtcttgagaaaatgattatatgtatcagtgtgatctggctaaaacaactctctccaactgatcacctgattttgtttcatttccccgggtaatctggtaggtggccatttcttttctttctagtctatgttccctcctaaagataaaacttggtcaaacatctatttatggtaacctgtctttaagatagtttcaggcataccttcttcctttaatctcatttggttgatatgttagatcctttcctatcagccagagaaataaaaatgtcttcagtgtcttaaacaaaattgtttacattctttaattaaatggtcattttaaggagagaaatgctcagaaaattaaactgagtatagaaggtaactgctaattctacatttcttttctgaaattgtgtcttcatttgttttttaaaaatcatttagaagctgtgtagcccacagagaagttctcaagtttgtggaaaagaaataattaagtcccgaagttaggggtagaagagaatggagctttgttggtcaattctgacatcttagaacacctcagtaatgtggttctttgaaagcatcaaatcgctgcggttactttagaaaggtcatttttagaatgcttatactacttttcccccattttgaaggtcaactggggtttattttaagttagtattgatgtaaaagatggcacaccctcttctggggcataaatgcttgaggatgagccatagtcatgcatgacatgtgtcaagataagaaatggaaatttatctgcagagactaccatatgatgtatgtgtaaattttcagtccctgggattatgatttttttttttagtgaagacaaatgttttttgttagttagatcctgatttttggcatgatttagtaggagaaagaaggttttagtttagacatagcttttcttacatcttgtgtaaaattgtcagttatagggagggtaaacactgcactctggaaaggccttctggaatgtccttatttctgtgtgagtgtgatggaaaaaaataacttttaaaaaaatacatgtttaatgaaagatatttccaggttattccttctggattttaatttaacgcttgtttgtatctctatgatagcatgtatgaaaatgtattttaatgatttaattatctccccatattagatgatcttgctatctttatcatatgccctgtttatttttctattcctggtgataggtggagtgactgatacattgcaggtacataatatacatttttgagtagatatgtgtatgattaattgacattttgcaagcctttttttccaacttttaagttctggggtacatgtgcaggatgtgcaggtttgttacatacgtaaacatgtgtcacggtagattgctgcacagatcatcccatcacctaggtgttaagcccagcatccattagctattcttcctgatgctctccctcccacccctcaacagtgtgtgttgttttgacagaccccagtatgtgttgttcccaccacgtgtccatgtgttctcatcattcatctcccacttatgagtgagaacatgcaatatttggttttctgttcctgcattaggcaaaccgtttttttgtttgtttgtttgtttttgtttttgtttttaaagaaaaaagaaagacatgctatgaaatggccttggacctaattcaagaaacgaaagaaagtcagagatcaaggaagaaaggaacaatgcagagtttatggaagttagatgttaagatgacagctgagtatgcttcttttctcctcacccttgtttagccaggtgcttacttgacaatttgtaaattaaattattccttgaacaatattttgcacaggagtaaaggaatgcttcatggataaacagaggcaatacctggagctaatctttgtggataaatgtgtttattttgattcctgaagctgggatgcagaactgatagagggaagccagggggttttctctgctccaccaaataaatcacatatgactagaaattgcaaccagacagcaatctgtgaagcaagtgataggagctccaccgtctggtgcctgctgtggatgtctggcacccattggtaccagatttggtgtaagtggggcttctgtttaggaaactttgccaatttttttttcttgaaaagtggattttggctttgtttctgcattcttatatgggaataaaaaaatctcataattgcaaatgtgtttattatgccccaaacattagatctaggctattctttccataggatattgtaatcctgtgtgggtacatttgctgctgcatttgacacagtaaagttgtattaatgtttttcattctgctatcttttagaactaagataggcataattcctaatttatctgtgctcccccttatgcatacatttaggtagtcaaaccttgagagtttctatagaatatttttaaaacttacctttggtctgtcttatccttggaaatgttttcacgtttgagagcatcacctcctatcagatcattctgttccttgaccctctccctctgacaaatttcacatctttcttcgcaggaaaaaagaaactaaggctatatcatggctttcttcactcctcttcattctgatatgaacatttgaagcaagcattgatttttttcttccttcttcttacttttgccagaacccatgatgctgtttattctggtggggtgtgtgtgaaacgcatgttgcagttccatctctcttgaccttttctttgtttgctatgtatattgcatctcctcagttgtccaggttatcgcaagaaattgtgctggatttctactcgctcaccttctatttcttactaaatattccttgttgtatcataatccctctcaccagaattcctcctgtgtgaactcatagattacaatctacattgctgcaagagactaccaaattttccatctttctcaggtttctgcaccttcactcactcttatatctttccaaactttcctttccatctttcttaatgtcaaacctgattagtcattctcctgcttaaaatcttccaccgagttctcagggctttcaggttgaagttcaagctcattagtgtgacatacaaggctcttaggacctggtggtctcagcccctggctacttccctaaaacactgcccactcagaccagatctaactagttttagttccctatatcatggtatactactgcgattttccatgtgcgcttactttactcccaggtctctctatcctcttcctcttcatgtaactaatttcttcctggctctttgacactgggcatcagtgtcatgtccccagtgtctaatgtgatgtctttcatctgttctcttataggcttggatgcatctccttcctgtcatcttactagtattattgttcactgtccttccacggtggcacagagtccccagggtatatcatagtattgtttgcaaaggtctactaagagtaaatgagtaaatgaatctaataattttttattgctttaagtgctctgtattttaattcactgcctatcaagccttgctctctttgaattatatttatgtctaaatgttcatgatagcatcagattgaattaattgtagccttatatattgactctcaaacatgaccaagactgttattgttgactctatattcagacaaataaccagacacatagagtaaaagagttaacccatagtctgtatgacctaatgaaaagagcttagacaagaaccaaggagcaacagtctcaaatgtcagatgcctttgccatattactcccatttctttttttatagttaaaaatgttaaattttaaaggttaatgtgatgctgctaagccctctgtagggtgattgatcagcttaaatgtaaactattttggtgaccatgatatataaagtcatagtgttgaaaaaattcaacaatagttagaatcattttaagaaaacaacattgatatatgaaaatattcacaattgagaaatcttatattgatgaacttagagattatacattttggtcttgaggcagaactcatcttagtaaaactgcttaagaacttaatcttgatcttataaaataaataaagatggtattttgtattttaaactattgagtatgatttcttgctgggatctatcactatgaaaagtgattattggtttagagtggtgttctcgttattttgggttttgaaggagcacagttcatcctgttggtctgtgttaaccaggggtaggtaaagaggacagaggacacctagcaatggctcaggtattatcagtgagcagggtgagaaaatccttgtgtaccaagaggaattttgtcatggatttgcagaactttcaaaaacaagaaacattatttccacttttcgtgtgattcctctcactttttaacctcttttctcttttccttcttttcgagatggagtcttattatgttgtccaggctggagtatattggctattcacaggcatgatcattacacgctacagcctctgaactcctggctcaagtcatcttcccatctcagtcttgagtaactgggactatagatgtgtgctgtggtgcctggcagagcctcttctttaactgtaatagacctgcttatcatgcatgaaatgatctacaaacacaaagtaccctatcatcattatctctttggagtactatgtcctttaaatgtattttcttactgtaactaactacctaggctggaggtcctatctctaatttagaaatgaagaaagtgagacctacttggattgagtgagcattcgaagtacattcagaagtggaaattatttttaaaagttaaatggcttctagaggtcatgtagtctcttttgtcatatagtggagaaaacagagaagttcaagatttccccaaacgttcttagttactggcaaacaggagctaaatgtcattcttcctggattttagtcagtatttgcttggtcacttttcttagtagagctttttcttctccttgcattcataaacacttaataaaagtgaattgataatgatcatatatattatataattaggtaatattagccgggcatggtggttcatgactgtcataccagtttcatatattagaagaaaagtacaaattgtgtagctactcaagtgcaaaatgtagagagaaaacctagagaagacatgaaactctctccttgactaatatcttcaggctggggatactatgaacaatggtgtgttcagaaagaatgaacaaaattgctgtagtaactcaatttcagaagagtttgaccctgtcagaatcatctactgtatttgcatgagaaatatgaaaggagtccaagggaaagatgatgtgttcagtgttcttttccactgcattggagcacctgaggagctgaagagagaaacttgtgtttcttctttgagtggcaagtgtgttagttaatatcatcaggcagaacatgctttccaagagtttagtttgctccttcacaaactaaaatactctgaagtgcctgattttatgcaaattacttttggttgttgtattgagaaatgaaaggatgccaacatttttttttataaaccaaatactaattagcattaccaaatttatctgttgagatacaccacttatttgtaagagaagctctttgacaaaatgaaagaatatgaataaattcttcacactggctatatgagaccttggaatgtcattttcttttttttctgtagaatttgtgtaataccctccactttgttggactgaatgagatgcatacaaaacaaccttgtaaattacagcattctaggtcagaggctagaaatattttctgtaaaaggcaagagagaaatattttatgcttttgtgaaccataggtctctgttgcatctactcaactctgccattgtagtgtgaaagcatccatagatagtacataaacaaatgagggctgctctgttccaataaaactttatttatagatacagaaatttgaatttcatgtaatcttcacctattgtgaaatgttatttttctcttgatttttgtaaccatttcaaaatataaaaaatgactcttagcccacaggctgtataaaaacatgtagatttggtccaaggtctgcaattcactagcctttctccaggtgactgcctcactatgaaacagttccaagtataaagggattaggatatgatgctgatgttgggattgcatttactgagctatctaggtgattgactccaggctctctctctgatactgagaacatgccttggcatatgttcccagctaacgtttgagaaaactcattttcggaggaataattttctgttgtttgttgctgggagttgggcagaatatctcaggtagtggaaggaggatactgcaccacacaactcatagaactgaattgatacagatagatgtcagcatttctgtgcaaaaacaaatgtttcaaagttttgaggtctcagcacttttccaggcacagcattctggatcttggcacacagatgactctcagtttgaatagaaaatgctcacctttctttttgctagttttattccagagccaatctctttataataaagaaagcaactgaaaatggaaaactcactgagcttaaagcagccaaaggaaaaatatgtgctcattttaagttttttcttttgcaactcttggccaaataggtttatttttaaatacttttcacaatttacaaatgtttgccttaggactttgtgtaatggcattggttttatacagctattacagttagggtgaagagattttcttcacagagatggttttggaaaatgtctcatcacacaagtggtaagtgtagtcgctgtaattgtattgaagaaaagaaatgactaatgggaatcacaaaattgtgaaattgatgatcatttctgtttttattgcctttattttaaacataatagtgacaaagtctgaaacaatatttggagattgctacatatttaaatatttaatgcaacaagcatcccactttattataggagatagaacatcgactgtgcctaacctaaattacttttccagggggttttagtggattattttcctattaaaaaaaggggaaaaaagaaaagaacagtctggtacaaagtataggtgacggcttcagctttgtaattacctattaattgatatctgtatataagtataacaaataaagttttaaatactgaaaatgagatgagagatactaaaggaaacaatttcctgagaagtattaggttagactgtacaaatgtaaaaaacatgtcaacaacctggcagcaagtagtcttgagaccttgaagttcaatgagagcagatgaattgtctgctcttttaatagtaataaaaactatctaaggcaaaattttggcatgtaacttaagaaacttaaaaagtttctcatgctttaagacactttgattttattagatctagaatgaggtctgggaatgtatatttttataaagctccactggtgacctgggtcaagttttgcaatacagaatttgaggcagataatattatgtaggaggtaggagatttattggggagtgctagaagtaccaataccagtgggggagtgaaaaaagcatgtctgtagagcagaagaagctggactgcagagcagttgcagtagaatcccatctgatcctaaggagccctggagctggcattccaggccctggagagttgtcctggaatgaggcaaggaggagggtttgtacccttgcattcatcagtcatgggatacaggatgccccagggagtgggtgaaaacttgagggagatagctctttccaacagagggtagtgtccagagaaggtctggttatgaggtgtcagaagccaacacttgcaatcattggacgaatttcagtcctgaagttgtttctaggcagcacaccagtgtgtccattacaacaggctattcttatgattgaaaaacgattgtctaaggggttgttgggaagaagtacttggactggagggtaggcaaggagtatttatctgtttcttaaacatgtacggagtgcctactatgtataggtactagagacataaacatgaagagataagttccctacatttaaggagcttaccatctagtgggactcagatatgtaaataaataattaaaacataattgtcaaaacaggagggtatgtggtatgtgcatgtttccaggttttaaaaaagctttacttcacaaacaaaaatgttctgttcattctgcttattttgatttgatagattacagctcgcagagctaatattctcttaatgtaagtttcttccccttcacagatgtttttccatctcctctaatttctcatcgttctgtgatgagacaaccagagtctttaaaaaataaatactttgcttttctatgattaaatggtttgatgaaaattaagccataagcataaagtgctaaatagaataaacccctggcacataaaatgggtaggtcctgatatcctctttcaattcttcaaatgtataggtagatactgataccctgtctcaactgtagtcaattacactatatattttcctctataaaatgtatcactggccacgttcagtagccctccattactgaatggggcaattattcaagaatgccccagtgaatgcctgaaactgcacctggtaccaagtcctacatatattgtcttttttttatatgtacatacctatgataaagtttaatttataaattaggcacagtaggagattaacagcaataacaaatacaatagtaaaacaattgtaacagtataccaacatcactgctcttgtacttcgaggccatcatgaaggaaaataaaggtgatttgtacaagagcactaggatattgtgataacgcagacatctcctagacaggatctactggacaaagggatgattcacgtcccgggtaggagggggcaggacagagcgggacagtgggagacttcatcttgccacatagaatagtggataatttaaaaattaggaattgtttacttctgaaattttccacataatagtttcaaaccaagggtaactgaaaccatgagaagtgaaactgcagatatgggaagactcctatagaaaatatttgggctgggcatggtggctcatgcctgtaatcccagcactttgggaggctgaggtgggtggatcatctgaggtcaggagtttgagaccagcctggccaacatggtgaaaccccgtctctactaaaaatacaaaaattggctgggtgtggtggtgcaaacctgtagtcccagctatttgggaagctgaggcaggataatcgcttgaaccccggaggcagaggttgcagtgagctgagatctcgcaagtaattggttatttactacataaaaatgttacgtagtattcatatttatgtttgattgcatcacttttttttaaacttttggctcaaatattggtagttttcaaggaacttttctgcagcattatatgaatatgatgacaagtagaaaaaccaaaagggtgcatcaatgtatgaaagctggtgtgttaaattgttatcatcattaacaattcactgctgcatgctaaattcatagctcacacaattcaatttatgccttataaaattacaaactattacaagtcatggactttaaggttgctcaccaagttatcaagaaggtcaaaggtaaatgcaactgtactattctatggtaatttttcacaaatcccattgattcttgtttatgatactatttcataaaactcagggtcatataataatgttctgtttcaaaacatgttggtgtatttcaaggtctcagaaaaggtattgaaattttttggtgagccaaagagaacaggaaagatgatgttttgtctgtaaattccatgttgactctgagttagaagagactctaagggtcatctggttctgggctgttagttttgaggtaataacgttttcatttacaaaaagaacattggtaaagtaataaaagcttatttttgtatatatacttatttacgcacagattatacatgggaaaaatggtgcccaggcagtttgctttcagtgatatatgttaggtgaaggtcaggaataatattgacataagtaaatattggaatagaaggcaagacttggaggtgggatttaaacaaataaacaaagttttttttttttttcctttttatgctactttgcaggaaggtcatgtcaaaattaaaatagattctgctttctaccttggcaagtaacatgtattatgcccactcacatgtaggtcttatctgctttggcaaatacttacagaagaaagtgtaatttggaaagagaagaacataatgatattagacaaaatagggtcacaaaaatttacaattggaaaatgatttgtaagttaataaaattacctagagccagattctactgtctaaatataccactgaatgtaaacaagcttttgctgagctagtatagacaggtttgaaaaacttggttttctccagtactcactcttatcaaggaggaaaaaggcccagaaaaaaaattctgaagagtatttttgtatcatttacttatgccccatctttttctcaaatatatttaagacagtttatcagaatacatactatgtaagaaaataacataaataaggaaatcagggcaaacagaatgtaaggttttgaaaatgaaaaaggatctggggaatctgaggataaagttaacacaaaaaatgcttgaggatctgttcatctgctgaatgacggttacaaatctgtaaatattctgatagccaactctaagagaaaaacacagttatttcaatgtttatagttatcctggaggagcccaattctttctctaagtgggaccagagaaaaatttcccctttgtcctaagaaagaattcctacggagtatagggtaatcaagaactcatgaagctgtgtgtcctgtaatgccccttaagtagttagatgattgcaggccaagagcaatacagtcaaactgattttaccaggaagaaaaagcagtcagtccaaaaacaacattcttgtggtttgattaatccaaaattggttagattcaggaatggaaatctgcatagactttaggcaaacctcaataattatttctgtaaccaagattctgataattgttgaggaagtagtgaattcaagcttatgctctctgtacttcctgacaaatccttggagtgcatcactgctatgttgttagtgcgtgtggacccatatgcctttgatatttgccaggctggggatataaatgacatataaagatgttctaatgagggctactcactctcttttctctctcacagacacattcactcatgcccatgtatatacagataatcatatagacatatatacacacacataactattgaataatttgttgtttaaaaaatatgtttcaaattaatggggaaagatagattggggaacagatgggcgtcagacaatttgctatcaatttggctagaaatcaagttagattcctatcttacaagatatgcaaaacatagaaggattataaagtcaaattaaaaaacaaagtattagaagaatatatggagcatttttatactcttgcagtagggaaagatgctcagagcaaacatgaaatccagatcccataaaataaaaatacgaagtacttaggcaaaaaccaagaagaaataacaaactttggtaagacacaaatgatagtaaatgtataaaagtcaatataagtaaaattaaaagagaagtgataaacttggaacatgtattctaaacatacaacatgaagaagcttagtatctatgatttttaaagaatgtcaagatattaatatacaggaaaaacagcagaatagaaaaatgagtaaagaacatagtttttttctttttgaattaattgaatttgaaacagcggtttttctccttcgaggagtaggacttttcacaaagcttcagtggattgttctaaatactggaaatgatatggagaagcacgtctcatctttctggaaagcgatttggcaatgtatatcaaaccttaacattacaaatgagcagacccaacaaatgttcatataaaactcacacctaaaaatataccagacatgaaggcaaagctatatatacaaagggtgtttacagaaatattattcttatgtcaagtgtggaaaatactaaccgaagtccacatgtccaactgaagaggaattagggtttaatgatttaagaagatatcatgaaactattaaaattatgtttaatgttaattatataggaaaatccttgaggtaaagttttaaaagtaggatacaaaattatgtcatacacacacacacacacacacacacacacattttacaaaaaccaaaatatatgtatgatatgtattgttttacacatggagagatataagtatacacattataaatacaaattaatacttttggtcatacaggatgtctctgttttttgaaatacatttttcaatagttttgacatttttagccataagtatatatcaatagtgttatttgaaaaatatttaaacagaacataactcagttaatatatatgtactaaataaatttataatttttaagggcagaaaagcataaatatttcaggaaattctgaactaaaacacagttgaaaacttctaagactctatatcaatatgcaattgcaatgttaaataaaataaagatgttagcaaatagcacaatagtagttggcatattggaactagaatttcatcacgttatttgcaagacatctaatatgagtcatttgacccaatattttccttgtcttactctgggatgatgatacctctgtcatggggttgctgtgaagagtcagtaagatgtaatcaaccagcgaatgttaggtgctcagtacattttaattcttcatcctctttctctttttcctctcagcacagataccagatgtaaaaatgttatttatttttttcctagcactagtaaggagttgaaagtttttttccataaaaacagtgcccagttcttggtgatgacagcagggagacctttctcactcctcttcagggtgaaggtcagtgggttcgttccagttcattgactggttgttcacagctgacgttatcacgattagacaatgctttgccttaccaattatttaacgtaactgtgcttctgtctttgctcataaaaactctggtttggatacttcactcattgaaagcagcagaggcaaatcatcaggtatatatacagcttcaatgcctaagatattgggctacttttgctagttagcctgtggtccagtagccgcccccacaccccaccatctatttttggaacgtatacaaatggagaaagatacattaggttcctccattttaatctagttatttttttaaaaaaattataagtatgaattttaggctgtaagtgtaattttgttagatggatagattgtgtagcattaaagtcaggacttttagggtagttaccatccaaataacatatattggccagagacagtgtctcctgcctagaatcccagcactttgggaagttgaggcaggtagattacttgaggtcaggagttcaaaaccagcctggctggtcaacatggtgaaactccatctctactaaaaatacaaaaattagccgggcatggtgatgcgcccctgtaatctcagctactcaggaggctgaggcaggagaattgcttgaacccaggaggcagaggttgcagtgagccgtgattgcaccaggccactgcactcaagcctgggtgtaagagtgagactctgtctcaaaaaacaaaaaacaagtatattgtgcccattaaataatttctcattatttattcctctcctatgtccccacccttctgagtttctattgtctatctttttatactctgtgtccatgtgtatgcattatttagctcccacttgtaaatgagaacatgcagcatttatgtttctgtgactgacttgtttcaattaagacaatggcctccagtttcatccatgttgctgcaaaagacatgactttattctgtttttttttttttatggctgaatagcattccattgtgtacctattacatttttttttcccagtcatgcactgatggacacttaggttgattccatattctttgctgttgtgagtagtgctgtgttaagtatacaggtgcaggtatctttttgatataaagatttctcttcctttgggaaaacacccagtagtgagagtgcaggatcaaatggtagttctttaaactctctaagaatctttacaaaatcctgccactgtaggtataaaacaatatgtggtctcacttagaataaaatggagacattttaagaatgtgttgtttgaatcctggccatgttctttcccagaggctacagtttggtgtagttcactggatgtgcctgtggacactgaacttgactggctattggatttctgactcctggaagattttgaggagttgcagctcttgttctctttcatctcccacccatctccagaaaagtccaggttacacctgtggaagggttaccagccagaggacagagtgtgaaggcttgcctggtaatggcaaacccagttgccatccacatgtcatactttgcaccatgtccctgatttgtatgggttctgtacatgtcacagtttctaagagtgaacctctctgcccccccgcccacatgactctgctgtcagctttccaaacaatgagaggacagctcctttgaaagatgtaagttttccattccgaaagatataaatttcctggtcctgcagaggctagaaatacctcttgtttgggtcactggactcgggctaggtgatctgcaagatcttacacaatgctactctaatatttcctctgtctccagctgtttcatgactccatccctgccatgtgtgtgccttaccatctttttaagcagagcacaggcctgggcagtggctcatgcatgtaatcccaggctttgagaggattgcatgaggtcaggagttcaagactaacctgggcaacatagcaagaccccatgtctacaaaaaattaaaaaaaagccaggcatggtggcgcgtacctatagccctagctgcctggaaggctgaggcaggaagatcgcttgagcccaggagttcaaggctgtagtggaccatgatcatgccactgcactccagcctgggtgacagagtaagaccttttcttacaaaaataaagaaatagagtacagattgtaactggcaacagtgagtctgtctcctccctttcctcgggcatcagagtcaaaagaatgacaataacatttgctataattattttaagtttttttaaatgatatggcccacatatagaaaataattatcatgttgtcttctaaaggatttgattactagaattagataactgatttctttctttcaaaaagtggaagcttttttttgtttgtttgtttttggttaactgcattttaaattttaggaacaagtagattcttcttcagtcttaaacttcagcacctgctaaaaataaggattacgtattaaacattatattttcccccagttttctctggatgttactgcaaaaatttactcactctcatttggatcacaggggctgataaatgtgtgtgtttccagatgctgcaccaggactgaacctgtggagtaggaaatgattctaccttagatacacataccctcctctcctgtttttttattctaagtctccctagcctcttaggtttttgtttgtattaccctccctctttcctgcttccagccatccctattatgactctaagggtcccatgaaagattaggtcatctgtgatgctgtcagaggcctggagaagtcctccacctatgtgtgcgtcatggacacctggacacaggctaaaagcttcttgagcaacttggtaatggccttctgaaaaaaaatgcgctcagccaatgtattactaattctactgggggaatttccaagtcaatttctggggactgagagtggtacagaaggatgagggtgtttaggtacactttaaattcacagtgtatgatgtgccctgaccacccccatcctccacacacccactacttactcctaaaacaattttttctaagccaaaagtggtttatgacaaattgtatgtttgcagatttggagtctaaagaggagtagatttatttaagggccatatttagtgttagtaaaagctacacttactatgctaattgcaacttaaattagagctttacctttatcaccaaaaaaaaccccactgtcttcccttgatgttaaattgtaggaatttaaagtaatttaaatttctattttttctacatttccgctttttgtatctgtacaatatgattatacatgtgaatggttaacaaaaactgtatactttagtctttaagtggaacctcagtgcaatattttgtaggcattaaaaatgataagcactttcatcagactattagttttcattttgttgactttgtttgtttagttctttgtggtataccctgtagttataatgaaatgatgtaaatctatatatttgccaacacatagatgtatttctttttaacttaactttttagcattatgcaggaactgctgctcactcgctaattatcccacagcctcgcaagatggcatctcctgttttctagcagatcaggatcaaaactttggaatcatttctctttctcttacacctcatatcccatccataagaaattctctgcatgtatctagaacttggcacttcttaccactttaactgctaccatccgtcatcttttgcctggattattaaaataacctcacatctgtccttttcttgccattttatcctttattcattagccagaatgagccttctaagactgtagtcaaaagtcatacagctcctttactcaaaccctccatgaacttctgacctcattcagtgtaaattcccaaggtccttaccatgaccttcaatgccctttatcatctggtctattaatgccacctgacctctttttctaccaccgccctcaggtcactctgcttcagacataggggcatcactgatgtttcagaagcactgcagaacccttgcactaactgcttccagtgctaagaatgagcttactttgtataagcatggcttaattccttactttctttggtttctgtccacatgccactttctcagtgaggccttcgctgacttccctgcatgagctagaatccactctgcacctggcagtctggacattcttaccttggcttatcctctattatcctagagatgtctgtcttcatccccaacacctagaacagtgacggacacatgatagctacctcatgattatatttgaatgaataaatctttaattatccataattgggtagtagacccaatcttgcacaggcagccaagaaacaaaaccaagaaaaaaaaacttagtttctatgtagacctgccactaactagacatacttccttttgcaggtgtttaacatctctgagtctcaaatgtctcaagtattaaaatacaatagattgaactagacaatttcaaaagttctgcttgctctaataaaatactttacacgaagtaaacacaattccactgatgtttgttcaatattttctatggcaaggccattcctcattatatataactcaagtagataagtagcagttgttatttgtcatatgtatgtatgtacgtacacacacatgcacacacaattcaccctctcccacaatatcactgtgttacacaatcctcagtcctattacctctgagacccattgtaaataaaatgtaaaatctttagagcatgttggacaaatacatggttttggttctgcctctttccagtcgcagacatcactgtgagattatagaactctttccatctaggccaagactgggtctaagaattcttctcagacttctaggaaagatatcaaacttattagagttgaaactagagatgtaacatagattttattccaggttttgggtatctgagagcctagaagtggtgtgagataaagaatttgatacaccttctccagtctttttgcttggttttccttcaattcatccttccaaactcattgtagataccacttctcctaggatttttccccaaatccaagactgtgttatgtggcccttgttatctgattacctagggccctggtctcaattacagaattattatgttgtaatttctttttaattttaacttgactgcatcatctacctgactgtgttctctagaggttcagaccaagaattgcgttttgaagactgagagctgggcctgacacttactagggacacaataaatgttgacttattgaacagataaatgaatgaatgaatgatgcccaggatagaatatttggtactgctgtcctgtctagcacatttctccaaggtaaaattatctcccacatatgacaaaaatctacctttctcttggttaaatcccttagtaagctgcctatcagagaatttgagggttaactcattcttttagaataatgtaaataacttggatgggagcaggctgtatgctttaggtcaattagaccaccttctcatgcctgagggaaattgtcccttaaggtctgttctatggcacctagtcccctaagatttgacaagaaagcgttccacagttcaatatatttggaaaacattgctcgctggcctttccccttgaaatctggccatggacattagcttattagagattctgagtcatctagtaaagaattctgtttaatttttttatagctagaatttttcatttcttttgaacttaaggataatattcaacattatatatattaacattctactggactaatgctttaggaaacagagttttacacacatagaggccatttaatagctttaaataacagtgtagcagccatatggcagtgagcagattggatttggaaaggggtaaaaccagtagggaggatgttgcagaaatctagatggaagaggatgaggcctataaccaaagtcctcatagcggccacggagaaatgaaaacgtttatgcaagaaactgatctcgttactgaaaagtcttttgcaagagtaactaaggtggttagagaacaggaggttggtactgtagtgctttccctcttctgcctttcaaaggtaagagcttgacttcgtttttaagccagcaggggttcttacatagctgagtgtctatcactacttaatgcatgtataatgccctgctgtactgatattcatgataaaaatcaaggtatttacagtcaattataatttcttattctcaaagcatacattgattttcttaaactaggcttttctgaactgggtatgataatacacattattatcataccattattaggcctctctttccaggtctttcagtgaaatctgtgtgtgtgtatgtatgcatttcctaaggctgttggtgcaaagaaacacaaactgggtggcttaaaaacaacagaaaccaaaatcaaggtgttggcagggccatgctccctgtggggttctggcagatccttccttgcctctccctgttttctggccatgtctgtcaatccttggtgtttgctggcttgtagctgcaatgcttcagtctccacctctgtcattcgatggtgtctccctgtatgtctctgtctctctctgtgtacacattttcatctttttgtaagtacaccagccaaattggattaagggtctaacctactccattatgaattcatcttaactaattacatctgccacaaatttatttccaaataaggtcacattctgaggcaccgggggttaggactttaacacacctcctttgggggcccaattcaaccaataactacatctgtgtgtgtgtggtgtgcacgtatgtgtatgtgtttgtaagtgcacacgtaagatgcaccaacatagatgcaaagacgtttgtcttcccaaatttactagtagtatttctggctctactcccatgaaattacctttaccctttctctttgaaggatggacaaagccaggtctgataaagcgttagaatttgtcatggctggtcttcacgcggcaaaccaattatgtgaccacccaggccttttcatcatgcttggtacattcatggaatgttatctcacactggggttggtaatgcaatactaattctaaaaggctattctgattaatgtattcatcttggtttagcattttttatattgtttatttcagctctcctttcccttttgtgatctaaatatattttctttcaggttattttgctaagtggttccgagctaattttattacttttttgatggtaagggtctaggcagagtagcctttctgaaaggcaagctttaccgacttctccaggttcataaatattaataatgtgtaactacgactctgtgtgctaaaacattgttgtggagattgtacaaggaaggcattttatgatttcatggagacatggagtagcaagaaaatggagcaatgacatttggggggagcatgacatctaaatgttaatattgtgtactgcttactgagaatgagaatttctcttcttttgatgctcgtgttgtcagttgcacgagagtgttcttcaatttgtactttacttcttctagctattttttttctttataaaactgctagaaaagaagccagctagtattttgaataaaagagttgggattgtataaggcaatgtttttactcagctttcctcgaccttttgatgaaaattccagttcaaaataaaaagacacaggcactaccctctgagagagtctgtgtgaccaggctatcattcttaagaaacggattgaaacttcttagtacatctcataaaaaatttagttagctataaatgttttaggctgttgcagctgatatcatttgccttgtgggaaaaaaaaatgaggctgttttatgttaagtgttttgttttctcttctctctattctttttttatatgtattaggcaatgcaaagacttttactaccattgttatgatagtatttaaataagcagaccaaacccatgcatgggactgaagagtaaagtcaagaaatatttgagatgcctcttttaaattaaaggtatattcttcattgctaattttgagttcaattttttactgtatattaaaatgttaatttcaatttcatctatagcagatggtatcctgcttttattttctaaagggattcttcaagtaagccctcagttgtcttgcattatgagtaattagagaaataccttggttggtcctcagggcagagctaaaaatagagttcagtgatttttttctgtaattcttactatttttaaatagaagaaaatgataggcaagaaagaaaaggccatacttaaccaaaatgtccatgacttctttcattactaacaaaaaattgccaagcttgacagtttgcaaataactctcccttctccatgaaggtaacttggaattcgatgtgtgtgtatgtacctgtgtgagtgcatgtgtgtgtgtgtgagagagagagagagagagagggaccacaaagtctctgatgttaacaaatacaagaggaagagcagtagatgagggcagaggtgtggtaagcaattgatctggcaaaatcttgaaagttaagacaagaactctgggtgttactctgagatgggaagtgtttcgactcagcaatcccataatgggtatatattcaaaagaaaacaaatcgttttaccaaaaagatacatgcacttgcatgttcatcacagcactattcacagtagcaaagacatggaaatcagcctagggcccaccaacagtagactggataaagaaaatgtggtacatatgcaccatggaatactacatagccatacaaagaatgaaataatgccctttgcagcaacatggatgtagctggaggccattattctaagcaaattaacacaagaacagaaaaccaaatatcgcatgttctcacttacaagtgggagccaaacactggctattcatggacatatagatggcaacaagagactctggggacccttaggggcaggagggaacagggggagggttgaaaacctacctatgaagtatatgttcagtaccttggtgccaggatcatttgtaccccaaagctcagtatagtgcaatatacccaggtaccaaatctgcacatgtaccccctgaatctaaaataaaagttgaaagtaaataaatagataaataaatgcattaacttttttcatgaaaactaacaacaaaaaacctgagaagacaggccgcaaaaaaagaaatatggaatacatttaacctacaaagaaacaatatccagaatacataaggaacatctaaaagtcaatcgtagtaaataacataaaagcaaactgaaaaatacttcaaacgacattattcagaaaatgtatcctaatggccgataaacattaaaaggtgctgaacattcttaatcatgaaaatgaaaaatagaccatactgagatgatcatttatcatccagtattaacaaaaatctagaaattatgacaataagttttgggtaggatgagaagcaatactgctttggggtatacaattgctttggaaataatttggcattagctgtaaagtttgaagatagacctatttacaggttagtagtaccaatcctatatatgctgtctagaaacttctgtacatgtttaccaggaagcacatataagaatattcctagaattactgaaatggcaaaaaactgaaaaaaactgcaactatccaccaaaagtaggatatatagataaatcaatagactgatagattggcagatagataggagtgctatacagctgttaaaaataactgtaatgcagtgttactcatcaatctggatgaatttcaaaaccaaaatgctaagaggaaagtgcaagaagcagaaaagaccatagaaattattccatttctgtaaggtcaaaacaagcaaaattcagcaacatagtgttttgaaatgcattcatatatggtagaactatagagaattttaggagaatgattaaaagagattcagaataatggtcacctgtggagggaaggagggggctatgattggagaaggtcatgctatctacaaatgtgttgttccatttctcagtctgatagtagaaagatatttgaacatattattgttcttcaaattgtatatacattttaatattttataaatatattctgcattaaaataaaaagaaaataggaatgatatggaaccagcaacgacagacaacttttttaagaattttttttttttttttttttttttttaacgaaagctattgtcttctatggaaaatgttgtttgacctattagcacttgattaggttcccctccttttcctgaaacactataacttttccctatcatgtcttgtactaaatttatgctagctgcaatgctagataacactcctccagacaggtcttagtagattaataataaatgtttatttcttgctcaagtaagaggaaaaatgagattacctataagtagcagctcattttcaaaaggtaattcaggtaccttgtatctttaaatctggtggctctgctattttcaacatgtggcttctaaggtctctgtgagaggagaaagaatgggggcttgcacatgtgggacattttcatgagcaaggcctgcattttcctccatatgctgttgacagaactcaatggcataggcccgctaactggtaatgagctggcaagtgttgcctagctgtgtgtgcaaaagaaaaagagacagatttttttttcaatagctagccattttatccatctactttccaaatatccacttaaatctttcttctttgcttaggacccatttaccaagggtgacagtccagtcccatcaccgttttgagctcaaataacaatatctccaggcagtatgcagtcttctccatccattgtaaatgtgccttcttgcggtcttgcaatctctgaattaaaaagacaagttgtctccctttcacatcttcccctctctccagagtgggagacacataacattcactggtacatggaaagaataatattctgcaggagggtggaaggggtcttttcctagcagttctccttggctcttatcactgtaggctagtgcatagccccatgcctattgtatgactgcactgtgtcagagttcaatgagttcaagtttgtactattccctgttcatgataagaactatataatagttaattgctgatagtattattatattacaacaagctcaagtaccaagtgtctttgactttggctgaaattatgtgcacactaagactagttaccatggtcatcataagctataaatggtaattttttctatatattgtttaatatgtgtgtgtgtgtgggtgtgtgtgtgtgggtgtgtgtgtgcacatgcacacatccaggaaaaattattacttgacacctactttttcttgtaaacaacaatttatagtaaatatggaaggaaatttaaagggtctgtggcttgaacatgttggaaagtcttgctttaaagctccagcagatcctttctgtactaaggcacaaaagctatgatttttcatctgcccagaataataaaattatttacaaaagcactgagaattattctttatatgatttccaaccttcaagcttctgtagaaacattgtagctttgtaaaatgtggtgccttaccttggaaaaaaaagctttgttttgaagccgaggaatagtaaagaaaactgctatgtccctagcattaaaatcttatatcctcacaatgtgaacatgcaaattaactagaagaaactacattttaaaaattgaaagatttttttctgagatgcctttgcattttggttatctcttattggtcaaccccaggtcagagttaacacacctggctctagagtaatacacatgtacaggtgttgttaaaggctgcatgatggtattctgagcctctgctctgagctctgtcctagatataaagaatgtgcagccagctgtttgtctacttgtcctgaccctgttcaaggattaatgaagagatcctctatctgtagtccaatgtctattgggtagggaccagaaatgattgaacgtctttgcttcatgatacgctgtgccagtatacatgaaaatgggaacctaaaagtactttcataagcactttgtggaacttatttcttcctttaaaatgtcctagacaccttattgtcacctcttggctccctctggtttctgtattttcactggtacattggatcaccatggcagagccctaccctgcacccaacccaatagcaggaaggtttaccttcagcttgttccctgtatgctcagtttccggtggatttattactgtttttggttgtccccagaggctggcttatcatgaagttaaggatcttgatgcctcagggcttttcacttacatagaaccttccaagcccatgggtcttgaatctttgctaaatcggtccttgctctgtatggtactgctttaactgaaacacacacaggaagctgtgtccttactttgcacagatgtattattcaacactgtgaatactgtagtaataatttttggtattttccttgtaaaacaaagagaaaagaaaacaaaatacagaattgtgctgcttttattcactgagtagtgtttcaaatcaagctagctttctggcagtgtgacatcatggcttagcaaagagtccttagaattttctaacttttaacaaaatggggaccttaaacaatctattctctgaaaaataatgttgaggtttcacagtaggaatgaaaagggtgggacgattatgatataactaactcaatttttaatgaataatgaattgcagagttaatgcttgtcagaattttccaggaattagggagaaaatgaggaagaaaattttacaagtagagttaagaggaagaggtagatgaatgcacgatcctgcttttattttatgactattaggatagagatgtttgaaacctgctgagtagctggtggaaggggaaggcttcaaggataaatagtagatggccatgcttgtcccccgacacagggaacggcctgcgcaaacacacttggtttgaggatatctgatgagttcaaagtgctttaactactaagcaggtggaatggcaggatataggagtcgtggcggccactgtaaaactcggtggttcagatgtgggtgacatgatttgcaaatataattacaaagtgatacgaactgttaaattggacaagtttagatttaggtgacagtaggacttagaagagacatctctatatttcctatgctaagctggaggtaataggagaacaaactactttatccacccctgaaaatgagactgttttactgatggaaacatcatcgtcttgaccatgagaaaaatccaagctagaatcctggccctgtggtttactagccaagattctttgaggggcattaatatttctttatgtatacattgagactctgtgatgatacctaccgcttatgcttgctgtgagcatgaatgagccaagatgtactgaagagccatgttaaatacctgtagatagttaataaatagtatctttattgttatcaagtaaatggaaagaattcaaaagaagggagaaagagagaggaatagtaaaatgtcatgagagctggaggttatttgaaaaatacatgttaatcaattgacgttatcaatcaagtaatcacgagattaccacagatacccagcttggggacaggaccacagaagaataatttgtgctgcctctcttgacgataactactttggttgaaattctgtatccctcttactttgacaaatcagaatcaagcgtggttgaatcttaaagactttttttttttctgaactaactcttactagttggcacaatagttaaatgtgtaggaggaaaagaggatgacggagaatgcatattttggtttggagagaacaaaaactgccctaggataatgtttgaatacatggccaccaacaagcccaagcttttgtggaaaaacactaaaatggctaaagcctctcagcataactgctttgctaatttaagtgtttgctttgagagtatgtgaacaaccgaattttcttagttaaatttattaaaaatgactgtacaggatggaattggccaatcagacaaaaacagttcaaaattagacgacgtttttcatcacttcacacttttgcagtgtttgctacaatcaagacactgtgcttagatgctgaacgtgatgcaaaggagttaaagatgtagtccttaccattgatttattggaagcaatagcatattacaaatactttatcttgctctacaggtaggcccgatacaagaagtgttggctatgagtaataatttggaggttcttcaaaaaactaaaaatagagctaccgtatgatccagcaatctcactgctgggtataacccaaaagaaaataaatcagtatatcaaagaggtatctacgctctcatgcgtgttgcagcactgttgacagtagctaagatttgggatcaacctaagtgtccatcagcagttgaatggataaagaaaatgtggtgcttatatacaattgagtactctttagccataacacagaaggaggtcttgttatttgcaacaacatggatggaactggaggccattattttaagtgaaataaaccaggcacagaaagacaaatgtcacatgttcttacttatttgtggaatcttaaaatcaaaacaattgaactaatggacctagagagtagaaggatggttaccagaggctgggaagggtagtgggggctggtggttggggaggtaggggtggttaataggtacaaaaaggtagttagaaagaatgcataagacctactatttgatagcacagcagggagactatagtcaataataatttaattgtacattttaaaataacctgaagagtgcagttggattctttgtaacccacaggataaatgcttgaggggatggataccccattctccatgatgtgattatttcacattgcatgcctgtatcaaagcatcccatgtaccccgtgaatatatacacctactgtgtatccacaaaaaaagtgttggaagagtgttgtgggatttcacacaaggcactgcctgggtttgtgtcactgctctgctctcctataccactcttgtcacataagcaagagacacacagtctcatatggagtgacaaattcggaaatggaaattcttttacagttaattaattcaattcagagtgtctcctcatcatcatccagcatttcctgagggtacctgttttgtgtaatgtggtaagcatagtctcttctcttatattcttccaattaattactttttctagagtttaggcccttctgccggagggagatgcctgtgtggtcacaagaatatttttctccctgcctccactttgttttggtgaccttggccatgttagttggctttattaggcttccacttcacaatctgtcaactcgattaacacaggcctccctggaatacctggctgttttgtttaagatgaatctaggaatatgacttgtttcaaatccacatgtcatcttgaaatgagcttgtctgggtctttagggttgaaatatatcccaggcttcttggctgctgatgtatatttactattttaacttcagttatctttttagtctgaaggctgaatgacttcttacagtgatcaacacaaagattatccagtagtctttggttgaatttattgtcttgacttcaatactatctatcagcaatactttgcaaggtcaacttttaaccatttttgttgttctttgccaaacattgcataaaataaaatataacctttcttctaccatattgtaatactgttgtaaaaaattaaatgatttcctactattccagtttattctctgtcaacattcttttcatactaaaaaggttggttttagcttatagatgaaatgtttttctccaaacttatttatgataataacaacaaatacttttatagtgcttagtatattccaggcactattataaacattctaaacaccttctgccattaactcattgagtcctcacaataatcttatgggtactgctaattgtgcccatttcacagatgagaagattgagggcaaagaagttaagtattttgcttatggtcacaagtgattgggccaatgtttgaaccaatcacttgtctgaaattttgcctttaactatttcacattttgcctcactgttagattttagttctttgttctgaatttggaatgcgtataaccatacaagcaaacacaaatttttattttttaacttgtaatattatggctgacctagagcagtgacatttttagtccaagacctagatacagacaacaggagatcatgtgtaaagaaaatagaataaaggtccttttttcttatgcagggccagcccaagataaaattttgtaataggttgaagtatatctttggcatcttttcacctttctctccctctctcaatttttggcactcctcctttcactttcatctattttttgctccactttgattagcagtagcctgtctaatccctgagagtaacccatacatcagacagaaactccaagtacagtgatacgggaatcaatgtaccctacctctgaccctcaaatttctcctctcagattctagcctgagaaaatatactgaaatgcaaaggtttttgcataaagatgttaatcacagcgactttcttttcagtaataaaaatttgaaaactgcctaaatgtacaacattggaagaatggttaagtaaattgtgcattatacaatacaatgcagcattatgcagccattaaaaactatgtttatgaaaacttctccatgacagaggatagtacataagtttaaatgctaagaaaattcaagttgaaagtagtataatatcaactctagaaaaatacatataaaacaaggaaagaaaaagctccaaatattaaatgtatacagattggatataaagtgattatttatagtttattccgttttctaatgtattagttttacaatctagaaaaaataaatgatcagtttttataaaaaccttcattcacaataaattgcaattttttcttaatcctcctagatatattgtcattttcaaaaatgatacttgccaatcccagtgtctttaattagtaggattctaagcagcacaagaaaatatagaaaaagattgaagaagtgtagagggaatatattcaaagtatgtagtatgtaagctgaaatagagcaaccgcaattgaattctcagatcactaaacttttcttgctttacacaaattttatctttcttaattcaattttttctttttcttttgtgctttctatttaaaagttaatgttttgttttgcattatattttttttcctctctgtgttggaagcaaagacagtaatgggaaaaggggacaagaaacggggcaaggatacactgaaggtgatatatatgatatatatatatatatatatcttcatagatggtggaattataaatggattacatatatcagatagaattaagtgtttgcaaattaaggcttgtttatactcttttgcaagcaatattttaaaatctgtttgtttattttttttatttttggaagccaagccagcagttgtttaaaattcatgcctctgcataatatatgaagactacatagatgagttttctggagatttctccttgacacatttagtttctccacgttgcttgtagaaaggatgattccattctctcaataccaccttccaccaggagaagccattttctttcctgaaggtcaacctacagccacagtagaagaggaaaccagttactgtgattccaaatataatttcccaggaggtgaaattccctctcctaaacatgaattggttacaggaaaagaaaaaagaatgtaattcgtaagactgtggagccattttcctaatccaatttctcctgtcccctagatcgatatcatgtgaattgcttccacaggggactgtgctagcagagaggggtctgtggaaagaaagaagcaccgtgctccaatggaccattattattgtttccatatcacagggtccacatatgcatgtaaatgtttttatagtacacatacacaaatgcaaaactgaatgtctaactaatgtcaagcacggtcacatacacccacactctctaatttcctgtccaaggtggtgatctgtaaaagagaggtgaactgtaagagctgaatgattagaaaataaattctaaaactcaagtgcacttaacagtggacgtaatcagtagagagaactaagacctttaggattctgatgcatctgtcacctgtaagtaaactgacagttctgtttttttaattattattaagcatgagttgctatataaatcacatctcattacaacaagccacaagtgactatctacatttttatgcaaaatgaatgctatcctactaaatgagcattgcctaatattgggagtcttttcttggtcatgcagtgatatttgctgataggggatttgacctgtcatagctttcttctagttttgtagacatttcttgttctctacctccctggttcccagcgtgcttatataatttgacaatatcttttggagcaatttgaaaatatgaatctcaggtcattggaatttgtgtattctaataaaaactggcataataattcagaagtggaattcattgaagaattatgggctcccaaatgctagtcaaattattttttatagaggtggaaagaaagggtcattctgtttttatttcaatccccaaagtatagattaaggcagcagtattctaggtcttacacaatcataggaggtgggtaacattgcaggagaggaggaaataatattcgttgactgtttactattggcaagacatcttaccaacagtttaatactctttgcaactctgagccagttggctctctctgtatatcacttttggaaaagctgaaatttgtaaattagtcccaaactctaggtcagagggtaggggagtgaaggaaggtttcattaaataaatggcccttgggctagtaattaaagatgactatgagttacctgagtaacaaggggagggaacagtgttcttagtagagggaacaacatttgcaaagaatcttcagtgggatggagcttaaaaataaggcaaacatggctgaaggacagagagtgtgggagagtactatataagctaagagggaggatataggcaggagctagatcaggcagtgctttgatggccattttaaggaattttaagcaatgggaagcttgaatcaaagactgtaacatgagcagatgtgctttttcaatacattattatagttgtggtgtggagaactgactgtgtggacacagacagactttcacttcaatcatctggatgaaacagtggtagcttagatggatgtttgtggtagagatggagagagatagagagtttggggacgatgggcagaattaatagaattcattgatatgaagatgtgaggaggtgaggaagagaaagatgtttaaggtgacatagaactctgcatcatataataaaatggatgggggtgccgtttatggagatacggaatgctcaaagacctgagttttatgaatttgatcatttttctaaataagtgcttgattaggagcatggatcacctatttggttttgaacatgtatttgccattcctgtgactcatgtaaaagaaatgtgaaaaggcagttggatctggactctagaagagaaatctagattcacaaactcgggaatgagcattgatgagaggtggagaactacaacagttattagccacatccaggagaatgagcctacaaggagaaacagaataatccaatagttaggaggaaatcaggaagatgactgttttgtggaaggcaaggtaattgatgtttcaaaacaattttgttggtttttgataatgtggaagttatgggcaagagaatgcttgggatgctcaaagaccagcaagaagaacagagtgactggagctaagtgggcaagatgattagatttaaaggttgattttaggtgtgatgagaatgcattaagaggttttgagtgaagaggggatatgacctgctttacattgtcactggactacagtgatagacagtgaaggaagcagggatggaagggcttggggggagaccaattaggagactgtgcattcaacattcagctagtatttatttaacatccagtatatgccagatatctgtaatctaggcttgtcatttggacttggacaaggaagaagtaatcaaatttgagatatattttgaagtcacagccgttgggatttgccaatggattgaaaatcgggatgtgaggaggagatgaatcaaggataatttcatggttttttggcttgggcaatagagagaattgcagtggggctgagactggtagccatagacaaggaacagaggtgaatagggagaggagcacgagttcagttctggatttgataaggaaatggtaatttttgtttataagattcttatgaggataaatgaagtaatgtctgtaaaggactttataaagagcataaacacttatcataagattattgttgttactattattagagtgggccatagtgaaaaccagtattctgatttgttgggccacctactgtgttttattcttggctttgtcactaacttgctgtgtcactttgagcaatttattggttctttctcaatctcaatctcttcctctctgaaagtttccaaagtgaacattagagatggaattgactagaagatcaggaagatcccaatcagctgtaacacccctatgatataaggctgattagtattatctcagtattattttttacattattgatattgatattttacttttatacagaagccaccttccaaagtagatttatcatattctaatgagcattgtgaatgatctcatttcagagataaaaatgttgaagggctttaattatatttaaagaaaaacagcaaaaatgaactcttatgatgaaaatcagtcatcaaaaaaaaaacctgagagatgagaaactacaacaattatccaccctcccaacatgtatgcagctattttgaaagaaaacatttggtacctgttgttagattttggaaggttacacacaaacttggaaaactgtctaaagaaaagccaagggatttttgagttttaattacttcttttaaaaagtaaacagtagtcaattaaggagccataacttgtcttctattattaaattaatggaatcatgcagtaaaatatcagtggagactgcggcattcacctggacagacactgctgttttaattatctatagagtcaaatctatccaaacaatcactctcataatgtaagagaaggaaagaaaaactaaaaactagtccatctctaatttttctcatatatcagggtttttttaagtttacttgctcttcttgcctccctgactcaatttcatccctagattattgcagcaatatcagcaactattagttattattttagttcataactatttgttattctttggatctaagttactagtatctagagtggttctgaatgaccaggtatgagcagtgtggaggattggaaagcacatattctgaagaggtgttgaactgaaacacatccttctaggtacttagctgttttgtttctaacaacttaaagatgttaaagtatgttgttcacatctgcctcaatataagtggcagaagcaacattcctggtatgaaaatatgcacccagagaacttaaaatttccttgatcaatgttaacctgctgttgcagccaatgacatatcttttacctagagctagaaggtactaaggatgaaatcttgtgggattcccatgtaatatagtctgaatgtgtgtctctgcccaaatctcatgttgaattctaattcccaatgttggaggtggggccttgtggcaggtaactaaattatagggatgagtttctcatgaagagtttagtactatccccttggtactgtcctcatgatagcgagtgagttctcctgagatctagtctttaaaagcgtgtgatgcttcgcccctctctctcactcttgctttggccgtgtgacgtggctacaccctctttgccttccaccatgattgtaagtttcctgaggcctccccagaagctgagcagatgccagcatcatgcttcctctacagcctgcagaaccatgagtcaattaaatccccttccttcaaaaattaaccattctcgggtatttctttatagcaacgcaacaatgaatgaatacaccatgggatgctgctgatgtttggatatcctctcacttctaatccctggaaagaaaaccttgcattccagagcattccatctaagcagctggaaccactccttaggtaggatctcagtggcccctgtaacaagtactatgattatagtggacaagtacaactgctcctatctattcaaatggaagaatgaagggacaatgttatagttacaaaaagtgcaaaattttattgcaaaacttcctagtaatgattctaattatctttattgaatgtctgccattttctaggcactggagtgggggttgatttggtttcccttatctacctattcaggtagataagggaaatttacgtggaagctgaagttccttactagagagagcattatcacctctaactctgaacccagtgggcactgctagttttgtagttcctggagttgcactctgcctttttttcctcacacttataactacttctccagctcctgccctggacaggcctgcactgctctgggcattctgcccactaatgactagtttttggctcatttcctccagaggctgcacagggaagagtgacctgtgtggccttatctgtaccatagattttctttcttgtgtccagctgtaatcccaatttatataaacatgtctatacctgagaccccagtcttgataccccaacatataacgtcttgctaatcaccctcacatagccctttaagaaggtattttataattaagagacttgaaactgagaggcttacttgcccaaggtgcttgggaatgcattcagatccacactgtgtttactgtactgtgctgtctccatcccattgtacattactcatttgtaattccagctgcttttgtttgagtgactagcaagtgttcaagtttcactcacatgccatactcttagaggaagtaaataacgtgtttcttgaacctcactgtgttcaggaagtactttatttaaccttgcctgcgggttaatgaatccttgctctgcttcctagggctttatgtatgattaaccaatatacctgactatatatttgaaaagttggccaaatactatatctggggcatggggttccactgcactgcagcagcgcgtatttacttgctcccagggctgtccactgttatgagagagagagaattcctactctgcattctaccccatcaccaactgcaatgtgagaagcgaatcacaattattttctcagtccctgaagtatttgctccagaaggctttatttgatgctagaaaaagattttcccataggatcaagcttgtttatggtggttaagaagaccaagaggggaagaaaatctgttagggcaatgtcagcttaagagagaagctgaaattatttattttagcaccttatttctacatacccctctgtttgattagctagacatctaaatccatgcaaagcattgtttatataacacaatctgcaagatccttacagtcatagcatcttcatcctccctcccctatgtaggcttacacaattgagaggagacaactgaagtctcaattcacgtctcacatttcacacaaagaacatcagctttttgtatcatttactctttacaaacatactattgattgccataaaaaattatctctgataacacactcataacatcctatctgttatttacccatctctgtgaaactgattatgagatttttcccaggtgactagcaggaagcaggtctgttaagggcaaaggaggaaggggtacagcttgttttgtgctgaaagaagaccagagaagtcagtgaagtcaacctcctggacacagctttttcccaagctgaccctgttgactgaggaatgccgagttacattaatgatggacactgtctgcccatcatggaaagcggagagctacatgtgtgggaaagggtagtaaactcctcctccacaactgtgcctccttccaagcttagatgacagaatattagtgtctgttatccttacgacatctctccatctggtcctctcaggatttactttatggtctgttttatttcccttttactactattagaaacaaacagctgaaaggattaatcaaaaatgttactgcttcaaagagtaaaaaacatgttacctgtttgactggtgcccatatatagttaagagtttctgaaggaagaagggtcacgcttaatagatttgatgagtccattaagcctggcttccatcttgttgctttgtttgtgcatttatttccattttggtatcttagcagtcatcttcttttagcaaacattgaggtttcagtctattgggtcagggtattagcaatacattaaccaaaccgttgaagacaaggggccagacatattcaaagtgtgatccgcattcaatatcaccattctcttgcaattgcaaagttataggcatcctttggatttttgcagcacttattttataagaaaaggagtaaataaagccacatctctgggatatgctttgagatgtttaagattgggaacattttcaggctgtctcaatactggaaatttgttgtccttttttttcacacattttctccctcttatactactctttaccaaaaggtgggtaaagataaggagatgaaaaaaatgttgcttaagtttttggttgccagctctgttttaagcctgacatagaagggggttgaaatttattttcatcattcagttaagagctattcttggctttcacaaatctcagtcctaattctgttattgtttcagataatgtagaatttgtcacattggctaaaaaaacaactccactaaatcaggacattagttttacatttcactgtgctacattctaaaataaaatgaccatttgtgctggggatgattttagaaaagcgaataagtaatataaagttttcctggttttctcatgggcagcctagaaaaatgccacaccaagactcaagaaattacattctgaattttgcatgaagataagacttgaagaaatcttatttcaacttatactttcctcagtttatgtcctgtaggaggaccctgtagagggggaatgcagaagaccagagggaagaaaatagatggtgtcaattgttatcaacacacgatagtatcacatttttattgagatataatttatatataataaaatatgagagttaaagtattaagttcaataaattttgacaggtgtatatacttgtgaacaaaacttcattaagatacagatgaattctgtcattctagaaatttctttatgcaccttcccatcctttcagaaaattcctcatgcccctcactcctccttctcctctatcactcatagaggcaaccactgatttctgtcactatagtttagtgttagctgttctcgaacttcatataaatggaaacatacagtgggtactctgttgtgcctggatttatttatttatttatttattacacctttaagttgtgggatacatgtgcagaacgtgcaggtttgttacataggtatacacgtgccatggtggtttgctacacccatcaacctgtcaactacattaggtgtttctcctaatgttatccttcccctagactcccaccccacaaaaggccccggtgtgtgatgttccccgctctgtgtccatgtgttctcattgttcaactcccacttatgagtgagaatgtgcagtgtttggttttctgttcctgtgttagtttgctgagaatgatgcaatcccattactgggtatatacccaaaggattataaatcattctcctataaagacacatgcacatgtatgtctactgcagcactcttcacgatagcaaagacttggaaccaactcaaatgcccatcaatgatacactgaataaagaaactgtggcacatacacaccatggaatactgtgcagccataaaaaaggatgagttcatgtccttttcaaggacatggatgaagtgcctggattatttagcttggtgtaatggttttgagatttatctgggttgttacatgtactagtagtttatatcttccattgtgtgagtatgccacacaatggatatttgggttgtttccagtttgggaatattatgaaggtgccatgaacattcatgtacaattttttatgccaattggctttaatgtctcttgagtgagtacttagaaatgggacggctagagcataagctaggtgcatatttagatttatgagaagtggttagttttccaaattggttataccattcttcactacctgttacccactgaatgacatactctgtgttctagccaatgctttaatgtcatttacctttttaatatgttaaagggtgtgtagtagtaactcactgtggttttaaatggcatttctctgatgaataatgatgttggataacttttcttctgcttattggctacttacacatcttcctttgtaaaatatctatgtcttttcactcattttaaaagtgaatttgtcttcttatagatttcatacatgttccttacgtattgtggatatgattctaatatgggaattgtgaatattctctcccagaatgtagcttgccttttcaatttcttaaaggatgtcttttgaagagaataattttaaaatattgataaaccctattttatcagtgttttctgttatcattagttttagcatactgtctaagaactatttgcctatcaagtttatgatataatctctttttttttcttctaggatcttcagacttttagcttatacatttatggcttatataatccatctcaagtaaatcttcatgtatagtataaggtcaagattaatttccttttcatatacatatccacttattctagtacattcatcaaaaagatgtttctctccacatttaattgcactggtgccttttacaaaagccataagtcacttatataagtgtgagtttattgatggactccatattttgttgtctatttgtctactgtatgccagtaccatactcttagttaaattttaaagttagttagcatacgttctctaactttgtttttctcttttaagatgttttagcaatttgaaatcctttaaaactacatatgaattttaacatcagcttatcaatttcttaaaaagctggctcagagtttgattggtattgctttgagtctataggttaatttagggagaattaatatgtttacaacatttagttttgcaacccgtgagtctattatctctctcaatttatttagatcatcactaatttatctcaccaatgttttgtagtttcagtgaagatagcctaagtcttttattaaatgtattcacaagcgttttctagtctttgatattgtaaattgtatagaattttaaatttaactttcaacttgtttttaatggttagtagcagttacttcctcctctgatatcctgaacccctcaaagttacccatgcggattggaatcaactttgtccaaactcttgtaaatgttaatattttgatttaaagtgaaagttgtcctgaatggtaacgcctaggttttcttctagggtttttatggttttaggtctaaggtttaagtctttaatccatcttgaattaatttttgtataaggtgtaaggaagggatccagtttcagctttctacatatggctagccagttttcccagcaccatttgttaaatagggaatcctttccccattgcttgtttttctcaggtttgtcgaagatcagatagttgtagatatgctaccattcaggacataggcatgggcaaggacttcatgtctaaaacatcaaaagcaatggcaacaaaagccaaaattgacaaatgggatctaattaaactaaagagcttctgcacagcaaaagaaactatcatcagaatgaacaggcaacctacaaaatgggagaaaattttcgcaacctactcatctgacaaagggctaatatccagaatctacaatgaactcaaacaaatttacaagaaaaaaacaaacaaccccatcaaaaagtgggcaaaggatatgaacaggcacttctcaaaagaagacatttatgcagccaaaagacgcatgaaaaaatgctcatcatcactggccatcagagaaatgcaaatcaaaaccacaatgagataccatctcacaccagttagaatggcaatcattaaaaagtcaggaaagaacaggtgctggagaggatgtggagaaataggaacacttttacactgttggtgggactgtaaactagttcaaccattgtggaagtcactgtggcgattcctcagggatctagaactagaaataccatttgacccagccatcccattactgggtatatacccaaaggactgtaaatcatgctgctataaagacacatgcacacgtatgtttattgcggcactattcacaatagcaaagacttggaaccaacccaaatgtccaacagtgatagaccggattaagaaaatgtggcagatatacaccatggaatactatgcagccataaaaaatgatgagttcatgtcctttgtagggacatggatgaaattggaaatcattattctcagtaaactatcccaaggacaaaaaaccaaacacctcttgttctcactcatagatgggaattgaacaatgagaacacatggacacaggaaggggaacatcacactctggggactgttgtggggtgaggggagtggggagggatagcattaggagatatacctaatgctaaatgacgagttaatgggtgcagcacaccaacatggcacatgtatacatacgtaactaacctgcacattgtgcacatgtaccctaaaacttaaagtataataataaaaaataaataaataaaaataaaaataaagtgaaagttgtgtgactcttcctttcacttgaaaacttagaggttcctggagggttattaattgttttaatttcactattgttttgtctcagggaatagggaggccagaggagagggagtgagataaggaacagacagtttgtggagcagttagaacacacataacatttgttaagttgaccatcttgcgtgggagtgatttgtggtgccccaaagccattatggtagtaacatgaaagatcattgatcgcagattaccataacaaatataatgataaaaataatgtttgaaatattgttagaattgccaaaatgtgacacggagagatgaaggaagcacatgctgttggaaaaatgatgctgatagacttgctgaatgcagggttgccacaaagatttaataggtaaaaaatacagtatctttcaagtacaataaaatgaggtagcttctatgtccttgtatgtttcatgggactttctatgtgcaccattatgtcttctgtgaataaaggcagtttaacgtctttgacaatttttttgtatagcattgaaaaagtttattttgagttaaaaatgtgtccttgtaaatttcttttctttttttaaaaatttcttctaaaaaaacagggtacatgtgcagaacatgcaagttggttacataggtatacatgtgacatggtggtttgctgcacctattgaccagtcctctaagttcccttccctcaacaggccctgatgtgtgtcattcccctctctgtgtccatgtattctcattgttcaactcccacttacgtgtgagaacatgtggtgtctggttttctgttcctgttttagtttgctgaggatgatagcttccagcttcatccatgtacctgcagaagacattatctcattcctttttatggctgcaaagtattccatggtgtatgtgtgtcacatttcctttatccagtctgtcactgatgggcatatggactggttccatgtctttgctattgtaaatagtgctgcaataaacatatgtgtgcatgtgtctttatagtagaatgatttatatgcctatgtatatatacccagtaatgggattgctgagtcaaatggtatttctggttctagatcctagttatgccttaaacttttattttctgtctaattgctctagctagggcctctagttacaatgctggatagcagtgatgaggtcagataatatagtaattattaaaacttcccatataaagaattcttgatccagatagcttcattaattctctaaatatttaagaaaaaaagatactaatcttatgcaatttatttaagaaaataatggagaaaagaacacttcccagcttgttttatgaggctagcattacttgacatgaaaacctgacaaggacattattagaaaagaaatcatggaccaataatgttatgagcatagacataaaaattcgtaataaaacattagaaaattaaacccagtgatatgcataaagacaaatttaccagggaatgcaaggttagtttcatatttgaaaatcagtagtgcaagtcatcatatttaacagaataaaggagaaaaatcatataatcatctcaatagatgctgaaaagcgtttgaaaaaaaggtaactcctgttcatgattaaatctctcagcaaacttggaatagaagagatatttctcatttgataaaggaaatctataataaacctacagcaaacaacacatataatgatgaaacattaaaacatttctctgtggaatttgatcttacttgcttatactttcattaaatgcatatatgacattttgtaaaatctcagttgctattattgtattattatgacctacatttagttagatgaaaaacacttttctggtacccaacaatttgtcattgccgtttagataccatttaacagtttttctgttgcatctacaagctgggtccacaccagattgggagcacactccaaagcaggacttctctgtttagcttccccctttccatgtttaaaaactttcaactgtcagaaaaatacagggaaaaatgttgtatcatgaaaccaagtaatggttcttctattaactcaaatactaaagtatgactatttgattagggatgctagatgtgagaatggaaataaagggatacaagaggcatttaaaaatagatagttggccggacacagtggctcacgcctgtgatcccagcaccttgggaggccgaggcgggcagatcacgaggtcaggagatcgagaccatcctggctaacacggtgaaaccccgtctctactaaaaatacaaaaaattagcctggcatggtggcgggtggctgtagtcccagctacttgggaggctgaggcaggagaatggcgtgaacctgggaggcagagcttgcagtgagccaagatcgcgccaccacactccagcctgggtgacagagcaagagcttgcagtgagccaagatcgcgccaccacactccagcctgggtgacagagcaagactccatctcaaaaaaaaaaaaaaaaaagatagttctggaattctgagtgtacacagaagataaaggatggagataggatgaataaagaataggagattttgtacatgttattttcttttctgagattagtcttgcctcttgtctttgactagtcaattcctcctcatcttgtttttaatcaacttttttgagataatggtagattgacatgcagttgcaagaaataatacagagagatactctgtatcttttactcagtttgccccaacggtgatatcttgcaaaactataatacaatatcacaatcagaatattgacattgatacagtcatgataaatagcattttcatcactacaagaatccttcattttgtgcttttacagccatgatgacttccctcctgaccccattccctgcttagcccctggcaactactattcctataattatgtgatttcaagattgttatataaatgaaatgatgtagtataatatgtattgaaggtagatagagtgattcctcccacttcataattaattttttcaaatatatttagcaattctaatttttctcctcatatgaattttagaataatctatatatacaaaatattttgctgagatattttataggaattttgttaaacttgtaatgtcaattatgggagaatttacatgttttttatgtagtatcttcgaatccatgaacacaatatgtatcctcatttacttacatcttctttgatttttttttattatactttaagttttagggtacatgtgcacattgtgcaggttagttacatatgtatacatgtgccatgctggtgcactgcacccactaactcgtcatctagcattaggtatatctcccaatgctatccctcccccctccccccaccccacaagggtccccagagtgtgatattccccttcctgtgtccatgtgatctcattgttcaattcccacctatgagtgagaatatgcggtgtttgatcttctttgatttatttcatcagtgttttatagttttcagtatacaagttagaactattgttatatttattatacctaaatatttttattttttgagtgattataagtgttactgttttcaattttggtgttcacatatatattgctagtatatagaaacacaatttattttgtatgtttatcttgtatcttgcaaccttactgaactcacttattagttctatgcactttttttatagattctttgggcttttctaaacagaaaaacctgtcatctggaagtagggactgttttctttctttctttgcagtcagtctaccatttatttcgttttcttgtcttcttggactggctagaacttccagtactatattgaataaaagcagtgagagcagaaatgcttgccttgtttctgagaatagtgaggaagcattcagtcttttatcatcatgtgtaatgttagctgtaggttttttgtagatactcttcatcaaactgaagttctcctctatgcctgtgtttctgagagtttttatcaggggtaagtattgaattttggcaaatactttttctatatcctgtgtagttttccaaacttggaaactcttctgcactctagctgccttcacatgggcaagtgttttcatatcattctgtgttcctctgtatgctttgccagaaaggagttcaccttaaattttaagacaatgttgtggatagagaaaagaaaaactttctgtgtcatggaaaagaggtcagaatttgggccaagattttactcctggctcttttatcaggccaggattttactcctggctccttctatcctttgcatagtgagatcatattctctttgagtctgtttcttcatttacaaatagaagaaaaatagctgcagtgatgatcaggtgacttgatagaggaaatgcttagtcaatgtaattggtttatagatagtaattaatgtgagagttttccccagatttttatagtcttcctttatcatttattgctttaccacaataagtcatttgtcaaggaggaacacgtatatttccctagagaacacaccgatatgagaacatacgaagcctacactcctcattcaggaacaggcaagagacaagtgtacatctagttccaccaagaaaacacacacacacattaacataccagtaatagtaagaaagcttttatggagattctgaaacatctattagaccttgaaagataacttagtatttacatgggaggagacacacttcaacctaccacgttaaaaaagatcccctgagttgtatcctgagctgtcgtagataagtgtcttcacccctctgttactagcctgtgttcagtctagtaaaaagcctgcaatgagaaaggaacaatgacttctttggaaagagaaaagtgtatatgttttggggtgggattaagagaaacagagaaaccaaatgttcctatgggaagctggaacttactcagcattcacttgagaggaaggacaacaagcccctgtgcaaacccctaggaaatgtcagtagagtcaatttctgaaaaatagataaacagcttggtaaagtaagctaaagaataatagtgatacatcccagattttccaggatatttctgattgaaattgtccaattcatttttggtgatgttttaatttttgatttgggaaacacgaacactatacttctatgtttagctttagtgatttttctgccacaagcaatactctagactttagttgagtttttccctcttaattaaataattcttatttgaatatatttatgtttattttaaaaaaggctactgagtacgagattaccacttgttacgatcttgctccttggagcagaacgtgacatctcatatgtatatatacttagctctcttgggcaaaagcttctccctttgttccacatggtcatctgaacattccgtgaagcatttctatcctcccaggatgttttatttcttgttttcatgggtgaagagagactgttttataaaagttttcaaatacttactggatttgtatcctaaagggagaaagcagcaggtcattttttttttctttcaagggcttgctgtaagttggtcttcctcttaacacgaagaaaagaatgacattcttcatgaccgccattgtgagtaggctgtattacattaaagccccattattagcaggctgtgccttggctgattttatagagagctcaggaacagaagtgtagaacaaaaacactgatatttttcactggcacaaactgcagatactttacttgttgattaatttgttaaaatgtgtggcagaacatttagttatcaggtagtcattctgagtaaactagagtcctatgctcctttaacaatggaaaaattatattttcctttttctaatatcccagtgttgtatgtatgctcatttatgttcttggtttaacaggaacattgaacattccctcactttgaatctactctaactcctgtgtttgtgtattttcaccacagtaagccataatatataaaatagtacaattaagaaaaccttagccagcacggtggctcttgcctataatcccagtactttgggaggctgaggcaggtggatcacttgaggtcaggagttccagaccagctttcccaacatgcggaaaccccgtctctactaaaaatacaaaaatgagctgggcgtggtggcagttacctgtaatcccagctactcaggaggctaaggctggagaattgattgaacctggaggcggaggttgcagtgagccgagattgtgccattgtgccattacactccagcctgggtgacaagagcaaaactctttctcaaaaaaaaaaaaaaaaaaacttaagtaatcttcataagtaaatgatatatacttaaatacaaattatcacatttataaaagaaattttctgtatttgtccaacatcggtcaaattccttaatcttataacaattgacacaagaacaagaactgccacccagtccacatttatcttctctatcatatttaagatattgcagggctggagtatcttcttaggatatactttcatcacaacagataacctattacatcagagattcaaagaagtagaatgggagagagaaggagttatattttttttaccctaaatgatgtcatcaagtcactatgctaatggagattgctgcacttgagattatgtgccttacaaaataatttaataatgactttagacagctgatatttcccatatagaaaataagaattcagcttatttatattctggaaagaaccatatctgctgcttagagtgaagcagacctgcagtttacacaacagttgagaataatcttgtttaccaagctctttggataaatagaaaaatatccaccttatcttgagttgctgtggtaatcagctgaattagtttactacttaagctctctggaagatgattggtgcatcatctgtgaagatgactggaatgttagcccactgaagttataacttgtggaacactgttcaaattaccgaaaagagtaaatcaactatctgctggtactcagttctcagggagcagtttacaccttgaaaaatcagatccaacacatactaaccatagtttctcatgttatgatttctggtggaattcctttagactcagccttattcttcaagatactgaatttttgggaaccctaagtacagtttctccttcttacatagagacttgatgttcctaactggtcgcaaacttgggttcatcagaagaatctgctccccttgtgagcacaaataatatctcagtgaagagaaagacactgtcatagaagagtcaacatttatggaatttcctggaatccacagttatcttaaactctgttccactttctctggacaccagctaccttcaatagtgccaggttcagtgtctaaccatggagtatctcatagttggactgggtgagtgcagatgcagttgcatgagattttgaaacatcacattataaaaaaaaattttcaggtatgcaaaaggcaggagagaacatgtactccttaccctgctttaaaaatttctcaacattttgccaattttgtgtcatctattccccccaatcataacattttttgctgaaatattgtaaagcaaatccaaaacattatttcattttacctataaatacttcaataatttacatgggtttttaatggcttgctatttattttcagggtttcttttagtatctttgacctctgtcacagctcatcttgcaaggttgcctatctcattgtcagagagctctagctaaagctcattcatcgttttgtgaactatgaggccacatattctgtgttgacccaagttgggccagaaagacagttttcaagagggcatggcttctaggtctctgccgcagcttgtccactttctttcattgtcagctactagaactatggcagcccatgctgggatataatttttcattgggcacagaaaaagagggtggcgttaggcagaatcaaaagtaggagctaagaaaatgaaaaagacaaggcagaaaatatgccaaaggtgcatatttaagggataaggggaggaatctgtgatgttgaggatgagtccccttgaagtaggggtgcacacaagagtctcccaacttgtgaattactaaggacaccaatggtgaactaatttataatagttgtctcctgtgactgagaaggctgagagtggggattatcagtaagaaaatagctcagaggcaaccaagttgtatggatctttagaaagggaagcaaggaaatagacaaaggacaacttcactgaaaacatttatgaagtattcagtaatgttttaacttctttttaatgagaaacagcaaaccctaaggggaaacactctggggtgtttatgtccagggtcagcaaggctccagggttatgtcttattcagacatattcaggagtaccggggagagagaatactccaggaaataggtgttggcatctgtggaaaggagagaaagtcagactgtatcctagagtcttagggataaatatagagtggaaaacatgaaatcatcttgtgaacacagggcagctattgaggcttggcaggtaggttggggttattgtgaaaaagttcccagcaatccaaagagatgttttatctttgacattgtgccgcctgtgccttgagttagaaaggtacacacacgtgtgagttaagaaaaacttctgatactaaattatttatagttaaacctctagtaaaaccctgaattcaaaaatatttgtagcagaatacaaatattctttttgttttgtcatttatcctggtaaaagtcaagttgctgcagcgtgatggttctggtactgaaatggtcttaggaaagtggaggaggagtggagttacatgtttttaaaaacttgttttgtggctgcatagtattccatggtgtaggatgaagctggaaaccatcattctcagcaaactatcgcaaggacaaaaaaccaaacaccgcatgttctcactcataggtgggaattgaacaatgagaacacttggacacaggaaggggaacatcacacaccggggcctgttgtggggtgggggtaggggggagggatagcattaggagatatacctaatgtaaatgacgagttaatgggtgcagcacaccaacatggtgcatgtatacatatgtaacaaacctacacgttgtgcacatgtaccctagaacttaaagtataataaacatatatatatatatatatatatatatacatatataaacttgttttgtgaattttgaaatagttttacacatacataggcattgcgataatgctacggacagttcccacagtccctgttacctagtgtccatcatggaaagcatataacgtaatcatagcacaattatcaaaaccaggaaatcaacattggtaaatgctattaactaaaccatagatcttttccagatttcagtagttcttacatgcaatcattttcctttatagcatatggttcactgaaactttatcacatgtatagatttgtgtaaccaccactacaatcagaatggagatctcttcaatcatcccaaaggaactctttggtgcagtccctttgtaatcttgtcctttccccaacctaatgcctggcagccactaatctccatcattaaaaatttgtcatttcaagaatgttatatgaatagaataataactatgcaaccttttgagattgactttttttcccattcagcgtaacacctgagatttatctaagttgtgtgtttcagttgctgagtaagattctattttatggatgtaacacagattgtgtatccattcatgtgtgttgaagggcatttgggtttttttcccccaatttggggctattactgaaattatattttactgttttttcctaaatatatgaatctgaaagtgtatctgtatcatttaagacttaactccatgtggaattaatttctagaagcgtgaagaacaggttaccagttctcccaggattgctatgatgactaatttttagctgaataaaatatgaatatatctattcatttttatatgtgtcaagaatgtgctgagagttataggaaaacagaaaggtaataattgttaccaaatcatgaggagtgcccaagttctaaaaaacccacaaagtcaaagaatggtgcatggctatagtttcagaattattttctcagagagtgccagagccaatcttcttggtacctgagggtaaacacccaacctcttgttcctcacttagactttcttctatacttggcttttctccatgaagggtactgtttcagcacattggacagaaaaatacaagcacagtgcaaaaataggtgtgaatgttgtactgattcaggtaccagtatgtgttttgaaagttaactctgcttttctagtgatacttactttggataaaacctaggtcaagcctgttcaaaactgttacccgaaggcaattattcaacattataagcacatggtttccagatcattcatcattttatttaacttcttgagtacataaagtttttatcccatttgtgagtcttgatgcacacaattgactaactgtgtttgggttattttctcttccacattgggaaaaactatctttcatgatctatctcccttttcaaagctgttaaacttttgtcttctttaaatgattttctgtgatgatccagtgtttcttgtcacgtttctgtacctatatgtgctactgttgtgtatttgtttgttcatcctgcctctcccacggaaagacctgtcttctgttcttcgtcaccaagactctctacacagtaagggctccatctgttttgactgttgacctactgaagggacatgcctttgcggacagattcaacacaaggttgaggattaaacccaggcttattttccttcggattttctcaacaatccttccatctcctagtagtatctattctcttctagcaactttttttttaaataataaaattgccttggtcttctaggaccctctgggaaggtaggtgtcaggatggaaagtaggttggtctgatcaagggagtcctgtcatgggaggtgagaagacctgggatctggtactggatttgcttctcactcctaacatgatcatgaaaatattttctgcttccttccttattagcaaaatcaggtagatataaaaggctctgaagcagactgggttgttgtaatggcaaagggggaacctaaaaaattctggactgagatgtgggagtcacaccattgtccactgcagacataccaaacaagccaccttaatttagagcacaggcttgtgagtctagtgatgctgttcaatcatacattttaatctctataaaatgtaatctcctatgcacaaaggtagtaccaatagcacttgagtgcctcgaagagagttttgcccaaaaagcagcagacttactgtatgatatgtccatctgtgaaggtcctggctcagactgagctgacagtatggaagtctactctaatgcagaaaggttggaaacctgtaattattgttaaaagtttagggttgtggaacctatttttatagcaagacaaacttgctctggtattggcccatggatgggtaaaagaaagtaaatgctttcaccttttaaaaaggggaaagtgtggcactgtcagcatggctcagtgctcactgtcatcctgctgctacatcatgtgcttgatgcactgtcatttgggtgataacatcacatttaagtcatgatcatttattcccagtgtcagagtgaaggagtcctgttcatttgagtttcagtattcctcaaactggatttcaaaaagaatttcttccaaaagaattcatcaaggactaccgtaatttcataccaggaagaaaactgtcaaaatatgtcatgagtccaactaaaaacctagctcaaaccatcatagtctctcatccaaactactaaattgacttcctaactaggttcctgcattgactcttgctcctccatagtcggtgctccacacaacagccagagggatcttttaaaattaaaattctgttgaaaatataatacccatcacaaagcctttggcagttttctcttagaagtgcatgcttttacttagcttcaagcaatagtatcttctacctgtaggtcttctctctccatatataagtccttcctatcttttcaaatccagattttacattcgaatatccttcaggagatgtttaatgatccccccagctgataaaagttaccttctctgagttttttatgacacagtatttgtatattttatgccatgtatcagttttctaccttgtatcatagtaatttacgtaccttcatcctttctctactttgaatttattgaggacagattctgtgttttacaaatctgcattgggtactcaataaatatttgtgaaataactaaataaatgagctgtgttaaaattaaaaaaaaaaagaaaaagaagtgcatgcaataaaaatggcttgctatggctcacaggaaccaagtgtgatctggcctgagtcagtcttttcaacttcccctcctgccactctcccctttgctggctttcctccaagtacactggggtttttacttttctttggatcttcctcagggcctttgcacttgtggttgcctctactgggcacttcatattcccccagatttttgcctgactcccctacttcatttatgatcaacatgtaatcactccctcattctttccttattctctatcccttaccatgctttatttttcttcatgacccttatatatcttagatcataatatatatttatttgttggcttatttcctgccttcctgtctagagtgtaaccttcttgagagcagtgacattgtctttttcatactgcatcccatgcctgtagtgtctggcacagaacaggtttttgattaatagtctttgaatgggtgaaagagaatagaggtatctggcatagtcgggggtcaagtcagcctgaggtcaaatccaaatcttgtagattcgggatattaatcatttgttagatacatagtttgcaaatattttctccaattctgtaggttgtctcctcactctattgattatttctgttgctttgcagaagctttttatttaaattaagtcccagttgtctgcaaggaacttagacaagaacaacaacaaaaaacaatcccattaaaagggggctttaaagtacacgaacagacatttctcaaaagaagatatgcaagttgtcaacaaacatgaaaaaatgcacaccatcagtaatcagagacatgcaaattaaaaccacaatgcaataccattttataccagtcagaatagttattattaaaaagtcacacacacaaaaaaacccaacagatgttgatgaggatgcagaaaaaacagaaccattatacattgttggtgggaaggtaaattagtacaacccctatggaaaacagtgtggagatttctcaaagagccaaaaatagaactactattcaatccagtaatcccaccaccagatatctacacaaaagaaaacaaatcattttattaaaaaagagatacctgtactcatatatttatcacagtactattcacaatagcaaagtcatggcatcagcacctaagtgtccatcatggaggactggataaggaaagtgtggcatatataccacagaatacaactcaaccgcaaaacagaatgaaatcatgtcttttgcatcaacaggtatgaacctggaggccattatcctaagtgaaagaactcagaaacagaaagtcaagtatcacgttctcacttatgagtgagagataaacaatgggtgtacatagacaagatggaaataatgcactctgaggaccccaaaagcacagaggatgggaggggtttgaggtttgaaaaattacatagtatgtacagtgttcgctattcaggcaatggtcacactaaaagcccagactcaccactacacagtatatcaatggaacaaaactgtacttgtacctcttaaatatattttaaaaatccatactttggccgggtgcggtggctcacgcctgtaatcccagcacggaggccaaggcaggcggatcatgatgtcaggagatcgacaccatcctggctaacatggtgaaaccccgtctctactaaaaatacaaaaaattagctgggcatgatggtgggtgcctgtagtcccagctactcgggaggctgaggcaggagaatggtgtgaacccaggaggtggagcttgcagtgagccgagatcatgccaccacactccagcctgggcgacagagcaagactccgtctcaaaaaaaaaaaaaaaaaaaaaaaaaaaattcatactttactagtgggcgattattggaatatgaagcatttcagtttaactttgtaagctttagtctttgtgttttaaaatgtgtctgatgctgtcttcttcatagtttgttaggagcactaaatgaatagtagaaagcctgccagaaagtgatttagtctgaatctataaagctgtttctgagcactgactgtaaagtgcactagaagctcaaatttttaggttttgtcattttgtgacaggttgatgtggaactcgaggggttggccaaagccctcagagggttgtaggccatgaaagttcgagaaccactgggccatgtccatgcaaaatgaaaaatagttaaattgaaaaacagatgtccttgtgcctcctaattcccagcaggggctcttgtctgaagcctgagatggctccttgggtttctgtgaatgttgtcaagggcgccaaggatgccggacttgcatttagatgcccaagcctctgtgctggaaatgatgggaaaaaataggaactcttgaacttgagcaagtattagaatatgtgaggtaatggagaagcctcctccctcatgcccatgctcttgtcaggcctgtttgttaaggtccaggccccacttcccactttttttatattattattatactttaagttttagggtacatgtgcacaacgagcaggtttgttacatatgtatacatgtgccatgttggtgtgctgcacccgttaacttgtcatttagcattaggtatatctcctaatgctattcctccccctccccctaccccacaacagtccctggtgtgtgatgttccccttcctgtgtccatgtgctctcattgttcaattcccacctatgagtgggaacatgcggtgtttggttttttgtccttgcgatagtttgctgagaatgatggtttccagcttcatccatgtccctacaaaggacatgaactcatcattttttatggctgcatagtaacagcaggttctggagaggatgtggagaaataggaacacttttacactgttggtggggctgtaaactagttcaaccattgtggaagtcggtgtggcaattcctcagggatctagaactagaaatacacgtatgtttattgtggcactattcacaatagcgaagacttggaacccacttcccacttttgtttcctttaattgcccttatgagaccacatccaaaatcccaagtcctgccaagtgaatgcagtacttaaagatttgactactggatgtctggtcttggagaaaacagtcaagagctggagcaagacagagagcagcatacctgtaatacagcttattaaaataatgcaaacacttctgtaatatgtatgaggtgccaggtagtctgccaagaacttttcatctattaatttgtttagtctttacaactgttcactccacttcctgttagggagatagctgttgttggacccaatgtagagatgaggaaacactgaggaccagagagtaggcatccaaggtcacagagttgggcatgcgtggggcagagccccaggctcaggcattctggatcccaggcccatgtgcctgcatggtagagggggagctggcactagcccttgtgcccccaaatatcctggctgcattgttcccctgttcttagttcatttgtgttactataaaggaatacctgaagctgggtaatttataaagaaaagaggtttatttggcttggaggtctgcaggctatacaagaagcgtggcgccacatcatctgcttctgatgagggccttaggaagcttccacccatggcagaaggaaaaaggaacagatattacatggtgaaacaggaaggaagacagagcgggggagatgccaggctctttttaacagccaggttggcagggggtgtgtggggagactcttgtgggaactaatagagtgaaaactcagtcattaccttgaggatagcaccaagccattcatgagggatccacccctatgacccagatacattccaccaggccccacctctaacattggagattaaatttcaacataaggtatggaggggacaaatatccaaactctattatccccataaatggttaaactccgggagagacaactatgcacctctcaatcccaaggtgagttgggattcacgattggttaaaacttcatcagaaccatccacattggaaatcacatctaaaacttgagtaattttatggtttacaaagcatattgacttccttgatttattcatgttgccagctgccctccgaggcagaggatcttttcacttttctcctattactcaatgccactactgagcctctgcactgaccctacggcttcctgtcgtactctctgcaatgctacatgtcccttctagtctagggcgatcctggtggaagcatgaagccagccagcctctctctggtcaccaccatcacttcattccttatatataccaggcatgggaatgtttcttttgcttgttaatttttgttcttgctcttatctgcatttatcttccttcccccaagtgtactgccagaccctggagaacagggaggggaattgtttttcctttattattctttcctcagttcctgctgtagaactgtacatctagtcaatgcttaataaatgctggtaagttgaattatcaacactgaacgtagaaatgcactgttgcctggcttgttagttttgtaagaatagggataataatagtagcaactaatgtgtacagatttgactatgtgacattatttaagggctttgcacacattaatccatttaatcctctccatgacctaaagcactgctatgctgaagtgcattttgcctatggagaaatgactggtttttgggaagccaatgtgcagaaggccttgtttcactacccctaaaacagtgcatgtgcaggaggactgttattgctgtgctttggaaggtctgtggatgaggaaatgtagaattgcagatttatgggttggaagttgatttagaagacacatgtaacagaagtaacaatcttatcagacttaccagtgtcttccacttatttccttaacttcagatgctcaggaacgacagcacctgcagaatgcatccactgctgaaaaatgagagctgtttcttgttggtactcttcagggacattttagcatagtggtggactccagtgttgacttttcttttcatcatctgtttgatcttggtggattcttaagaatctctggacctgagtttgttcatctgttgattggggttcatggtagccacttctcaaggttatgattgaggtgaaatgagatgctatgtgtgcaaaggacctggtagcaagaatgacatgggaaggagggcttgctcaataaacattgcctgttatagtgtgctggcattaccttaaaatccttaataagctgtaagttttggatgagagtcagaagtgttgggttggtgaagcattttgctacagattgcaggcttttctccggtgtcacaaggcattgaaaacgcttgttcggagacagcccagaagggaaaaaaaaaaaaattctggaaagcctggcattttgtgctatgttgtgagtaagacatttatagttattgagccaaaatttccactgtaatagaaaaagcagttgcttttaaacttctggtccaatttagtaattatgggtgagttaaaatgtaggccatttgaattggatttggaggatcaagtaagattctgtcctacagtggggatgactcatagaggaggtagcttgacatagtggaaatagaagctgataaggagccaggagacccaagttcctgtcctggatttgcacaaataaactgtaatagcctttaggcaaattattaaacatctcagttttctattatataaaatgagagggctgtgtttgtgaatggatctttcaacatgcttaaggttataccaaacagatcactgaaaatgaaatatgttatctacagtcattagggaataaagtattcttgctagtgcaatatacttatttggagaggattacaacataaacaagaaccaacgagaatacatcagtgccagaatgatacagacataagcagacacctgaggctctctgatacccgcaggtcattgctatgtcctaggaaaacatagccatgctagttataagagttttctgatgatgagtctttataaacagaggatttactgggaactagagatggaatttttaaatgatttccatgttatggatgacctgtacttgggcttatgatagctctgccacatcttgagaaataatttattgactaaactcgagttggcaaatgtaaaaactcatttgggttagctagcttgtttacttgttcttggcattctttcttcttcttatttcagttgtaggcatgaagccacattttgggctgatcatctttataataggcttatggttttataacatcagattttgaatgatagcattttctgctctctgtgtttcctatcacctgtagaattaagataggtcaaatatggaacagatggattgaatgattccctagaattattcactgacattataagggtgcctcctgtggcacaaatagaaatatttctgagagttgtaaaaattaaatttttaaaaatcgaatccaatttttctattgacctgcgttagaatttctgagacattctatcttcatttctgattgattttcaattagcaaaggttcctgccattttaactttaaatttcttagttcccctttttcctccaagtggttaatgatctgtgaacaaatattggagcaaatcagagatgcttcagtgtacagtcaccctatagatatttctggtgtgcaagggagtgagctacctgggagatgaggaaccttggttctagtgttttctctgccaccacagaggtatgcatctttgaataaggtctttttgcctgtttcaggcaccattctctcatttgtaaattatgagctccattgatcctatctggcttcaatattctaccgacaattgagtgggaaaaggaaactttctctgaatcataatctctcaacttttcttttcataaattttcttaaagtggattatacctatctgtaagtggataacagcctccatttattatccttatttttatttggctttttttttgacttgcaaattcctttttggatggattagattgaaaatctttgggaggctcaatcagcccagacagatttattcattctttattctggatgaagaagaggaaatagtttaagatagatctgacatggaacattaatttgattgaagcctttctgtgtgaggagtaattgtagcatcttcattgtcataatggagagattagcatggattagattagcttgtgtacaaaggttgtacaaattgattgctgtgatttgtaggctgggctgatctttatagtcactggcatgacttcttaagcattatagtcatgatttctttcatgtggtttacatgtggcaacaagaaaagcacatttccctcgttaccaaaaccttgtgtctcccaatgggaacttgacatagactcaaaaacataagacgtgtacatataatattaaggagatggcactggtcatctggcctgctgtctgggatgacagcacacattggccaaagacagaagagttcccaaaacagatgttcagagaagatggctagaatactgttgaaatgtggtctagaataattatgaacataagcctaaaaaggtagccaagatatggctctgaattatagccagtcatgggattattatttaactccagtttagtatgtttcctgccaagtatgtgccagaccctctgaaacagaatctggtttttgccagcagtgcttagcaactctatattttaagtctaaattccaaaaaaaaaaggaagagtaaagaatactaaactgctttctgatgggagtaagttgtatttcaagtggcctcagaaatctttttctctagaggagactttctgtggctaagaggaagagagtgggcacttctcccctccactgaacccacctggacttggtctctctcccaaggctttcactgcaattgaaaggctttttcactgccctaggtctctctcctaaggctttcactgcaattggtacatgtgttcagtgactattagaacttaaatgatcactctcatcccacctcactgatctcattttccaaatttctccctcttgctctcccattctagggaatctggccttcttcttggtcttcagatgcactgaacatcttcctgcttgaggatgtttgctgccttaccttactctgctggaaagcaattccttccaatggtgcaggtctcacttccttacttccttcagattttcgctcagataccatgttattcatgaggcttccctggccaccccatttaaaagcagcaccccaccagcattgcctatcacccccaccctgctctgtattacctgataacactaatgaccgtctggcagattatatctttatttgcatatttattatctgtattctgtctttagaatgaagacagaggctttattccagtgactgaaacaatgcctgacatgtaatggaactcaataaataattgttgaaataatgaatgaataaatgattagcctttaatttgtattcattcgtacacattacattggggttttctagaagacagtatgaaaatttcacttaatttgtgactcaagtacagaaagaacgatagagatcagaggttcttaaacaactatccatgaacccaacgctgtgctttacaaaatttaacgtgcatgtgaatcgacagaggatctcgttaaaatgtgaactgtgatttagtagtctaaattggggtctcgggttctgtgtgtccgacaggctcacatacgatgcggatgttgctggttctaagattgcactttgaggagaaagactctaaagtacctgtggaagggattcaaggggttcacaaagccagggttatgaatgtccagtatcattgttatagcaaagaactgaagtgctagtttctagaaatttctggtttatgcaataccaatgaacagatcatttattggacattcattgcagagctttcaactgttaactatgcatggttgttctgtatgcagacataaatataggtataggagaatttctttttctgaggaaataatagaaaatattcatcagtttgtcaaaaggatcagtccaaacaatggtgacagccattgttaatggatgatggcattaaacaaaagaaactttaggtatcaaaccaaaacacatcataaccacatcgtaaaagtagtgacaaaaccaacacatatgtttgcaaataccttgggaagattgtgttttatagcaatagtttttttgctaaacaaacaactaacttttaaagttaacatttgctggagatgatattttcccagggaagtatttaaatgcttggaacacacctatccaaagacaaatatttgttttcccccagccactggaaagagaccccaactggaaacattgtctagaaatgaatatttggaaactctgaggccctctataaatgccattgcagtagctcactgtccttctaagctgaggccaaaatgccctcaaaggggccttggtgtagaaaagctgttttcaggcaaaaaaaaaaaaaaacaaaaaacacaacagcccatcaagagctgcatagcttttcagtcaggaaacttacccccaggtggatgtttctcagccaaggagtgtgggcaatttagtttcaaaagtaatttggaacaactgagatgttttatattaaatggtcctactaaatagacatctagcacagggcttagccaaattctagaaggcctcgcatggtatggtatcacgatcctcataattgctaaaaatattactcataatcataatggctaacaattattgagtctaaatatatgctaggcaaggtgctactaaccttccatacattttcttatacaatatttataaaactaattcggatggtactataagtttttttgttttgcagaaaaggaaactaatgcatggatatgtgatttatattgctcaaggtgacaaaattgttgagttgtagaattgggactcaaattcagatatgctgattccggggctcatcctgctaatgactgtgctgtactcataatcataacaaattgatttttggtgaccttgaaaccctgcttaggaaactaaattttaagattttggttgaatttaccctcagggtggagaaaacacaggttttcataaacttactgtcatcaaattaactatcctatattatttttcagaataaacactcactacttgttaaggaaatcatggtgaaacttattcatatgagctaagagcttctgcattcccatttcatggaaacgtggattttccacgtgtggctctgtagcatggcaaaatagcttggtgtgcaaaaataccctagggtaaagataaatgtaattgtttttgaaatcaaccacttgtccctaatgctcaatctgtgcttctgagaatttgccgagtttcaatgctttaatgtgtgtattgaacagggctttctgttgcaaatagcagaatttgcacacgctagttgaatcagaaaacaataacgtaacaacagatactaataaacacgtagaatctcggagagtgccaaagagcagggttctggggctacacagccacaccttaggacttctctctaatcatatgacttctcagcacctgtgatgccaggacttggcctcccaaagctgaggaaccaaatgcctcaccaactgctcctgccagaaaactggttctccctggtttggtgcccatactctttgaattttctggctttaaaaattggactcatggtgtgagaaaattccaaaatgtaggaagatcttcaaagatgttgagcagtcaccacgaggaagcttccaatgttgtgtatttcagatcagtgttgtggagtatctttccctttatcacacttttccttcatttttactccctttgattgctaaatctttacagagagcagggactctgttcattcagtccccagaatggcaatgtgttaagtccacaagaaggcttttcgtggacttttggagtctgatcataaaggagaaatatgtcttaaaaaggcagtggaggtgatgtggtgaattttgtgcttagcatttttaacttgagaaaaatgataagacaggccagtcaacacacaatgggcaaatggagataggtgactgtaattcagaagtgcacacaggactccaggtttgagtatgggagttgtccttcaaggattggcagttgaagcattcaccagagcatggatgtgttttctgagcaagagctgtcaataattaggatagaaaactgaacgtggaaccctgaagacctctcaccctgtgccaaagtccaggtgcagaaaagaaaggtgagcttgtgataaagagcaggcagagttcagaagacagccatattattttggtgtcataggggttaaaggaggcaattcatgagaattgattgcttttttctcactctttattgagatatagcttctcaaatgtaaagcatgatttgaaagagatcagtaacaacagttatgcattacatttgaggtgtgttttgtacttttcaaatttgttttcaaatccccatcacttcatttaacttcattcagacacttaaattgaaaattactttctatgtgtggttaaaaaaatcttgcattatttttgtttttttctttaatctaacttaaacatggaagaaaattcagttgtgtgtagttaatcacaggtttgaagaaattaccttaattctattttgagaaagaaagagtatcatgtggtatacagagtgaaggcttggatacctccgttgcacaagtttcctgcttagctgggacctggtcaggccacttcacctcccatttaaaacatcctttagaactaggtatggagctaatgttttagatatgaaaaataattattcacagcgtgttactataaaacatatgttcatagattcttacatttgtatacaaaacaagaaatcacaaagctttattcatgcagaaaaaattaatttgaaaaagcccactgtatgccaagaaatattcttgatgcttggaggtttggggttgaggtagcaatggggagataaaatgaatatggcttgcttcttgctttctgcaaagaattgagtttcgattctgacttaagagacataaacaaggaaaagtacattctccatgctgcatatgtgtggcttaggccctggcttgatgaagggagatttggtattttgttaatgtaggaaaaactaaaccaaagtgtcttttctattctctcatttaacagtagtcaacacagaagacttctgtgacctctagtcaccaagaagtgtgtggggatttctcactaccaacaaataaaccatcagttctgcagctgacactagctgggtgtcctctaattcaatgctactctgacactgtctacctggagatacagtcagatccctcagcttgagagctcagtccctaagactgtttcctcccctcactgcagatgccagtcacaagctccagtttgttgcgtctgtgcttccagccagctggctataaattggggttccctcaacttcccccttgggtttgattaagttggtagagtgattcacataactcaggaaaacacttacttacatttaccatttaccagtttattatacagaatattgtaaagaatacagatgaagaaatgtgtaaggtaaggcatgggtggtgggggacagagcttctatgcccttcctgggtgggccgtcctccaggaaactctgtatattctgttacccagaagctctctgaacccaatccttttgggtttttacagaggcttcattatataggtgtgattgattaaaccatcggaccctggtaatcaacttaactttcagcctctctccatccccagaggttgtggggtgaggttgaaagttccaaacctctaatcatgatttggtctatccagtgaccagcccccatcctgaagctacccaagactggcagccagcagtcaactcattggcatacaaaatacatagtttggaggctccactgattttcagtgtggtaccccaggaaagtggatgaagaccaaacatgtatttcatgaagccttctatttcagtagtaagaaaaatactaaattataatacgaatttttttataccagcaaagcagttgcatttgcatctttaaaatgcaagtgcaacttctttttagagatctattgcattttaaagatgcatttcatcacttattacagccaaatgacttgcccaggcattagattttctgttgcagtgatagcagggatttaaataatgattatcttctctttgacctggtgaatttcttattaccctgcatatagacatggttggattgtactgactttgcaaataccacacaactgaagttggatttctgttgtccttcaatcaaccatctacctaagcctcaaaccgttttgttttgcttaaaaacagaatgagtttggcaaacctagaaaagtacacaaaggatcatccatggatataggatggaagatgtatgaatatggaccaacaacagtgtttattttaataattctaatattgttataagttgtcataagcttattttcgtaattagagaatagtcttcaatttacactgaatgcatgtttggcaaatatactaatgttatatatgtacttctcttgttcagggcagtcacttgttttaagtaacatgtttatctttattaaaatatgaatttcatgcggttttacagcaaggttattggttaaatcaatattctcaattaatgaaactagtgacatcatcatcaagagcaatagctagcatttgttgaatcctgactatgtgtcaggcattattttaatcacttcatatattttaactcatttaatcttcacaatggctctactatatagaaacatgtattaacccaattttgccagagggttgagacacagagattttagggaacttaggcaaagttacatagctagaaattacagtcagtgattgcaaagcttgtgctcttaacttctattttatcttgtatctgtaaagatatttactaaccaagttaagtgtccttagagcatatttttatagtataaaaattgggaaaaaattaagataaagaaaaaaacccataatcctactgctgaatgagagctctgttaacattttgaggtacacatatttaggctttttccctcctttacatacattcacataatttgtattataaatgctcttttaaattaattttattcaattaatatattttaaaactttccccatggtattatttcattattattttaaatggctacattaagatatggatatttaggcttgaaataagtttaaacaaacctattgtcttcttaaatctccagtcatatttccatgaaggatggcagctcttagaagtcatggaagcaaagaacagtacccctcaggaccattgtaagaaaatgtcttctttgagagttcttaagactattagcacatctgaggacattttcctaaggattcatcttggtgtaaggacacactggggatattttaatttgtagtgatttgttgttgttgagcaataaacagtatatacctcttgaatttgctaaggaatgtgtgagcatacagtgctggtaacactacattagttaactctctttacctttcaaaactgatttaatgaaggtattttaatgccgtttcatagataagaaaatgaagtgcaaagtagttaacttgactaacaacaagtaagtgaaggagacataatttaagctttagcacagacaatctgtctcttatagtgaggcagtataacaataaatatgtggaggagatttctaaaatttccagtgtatgttaagaaaacaatgtattttatgatgttttagagaactgcccattataaccaactgataatgaaattcttcatctttccatgctatcatatttttcccttgtcagcacactgacctaggaatcaagaaattttggttctaatactcgcatttccacctttctgggtctcaagtttttatctttaacataaaaggttagaaaacttgaaaatcttaaagtctcttcttggttcagagagattagctttatggagttgtagagcctgtgtagaagctttataaagtggtttagagtcaattgacctcattggagaaaaaaagtagtcagtaagttcttcacctctgcaaagtgcagactgaatgtggagaacagaattgttgttttcttagctgtggctgtagcaggctgttactgattaccctcataagatgttttgaatttgtcttggaggaggtggctttcagcctgactttcaggctggctttgggtcatcctgagtaagaacaagactggtagtatatgctgccaaatgtaaaattatataactgcccaggagagctgtcacacgtggaggatactagaggctgccatgacaatattagccaaaaaatgataaaccacaacgtgatagaaggaagaatcctcactttatagttgagccccgagtaagtgaggaaagttgtgcaagtttgtaacttcagtgtgatggttgaggatggaattaaagtctcctgactgcttatgaaacctcccacctatatgtttttacgcaaaatgtcatggcccttacatccttttgtttccattgctatgatggttctggattgtaatcctataagaatatgatcacttaatgaatttatgttcattatatttcatatgcagcctgaaatgcctctggtttctttattagcaaatcaacagaaaacacttgataaccagattcaagattagacagcaaagatctacagaaacagattaatatcattttatggcatactatgatctttttttagggaattaactaattactgctcaaggaagcatatccaataatatgcgggtaaaaggatataagcaaaaaggtagcagtaaatagctgtgttttggattccacaaggcttgtgttaggtgaggtcttattcagcatagttatgatgtggtaaagagagtacattgcccactaatacacatttcaggcattataaattgggaaacttgcaaatgcaaataagaaaggatgggtaaaatcaatatgcttagtgaagaagggatcttaagaaatttttttagaaaggatatgggaccctaaaactattgaagtaacaagaaattaggacaagaaactaatatgggaccctaaaactattgaagtaacaagaaattaggacaagaaactaacagtgatagaggaagggtactggcttgttagatttgggctcaccgtttggcaatccatctctaaaccctatcacaacttatttataataataatcttggtgctgatcatcataatctgggtatgcagatttacctacataattttaggcaaattggttaacccctctggacatttaattcctcatctgtgaaggagttacacaagaatacatttattggtttaaataactactgttcaatagagaatttttaaattagcatctgtagctctgttaggagggaaaaatgatgatgttttatgatttcaacacatgacttcatttctttgagctatgtgacagtcatgctttcctccattattcatcaatactccccactgcttaaagttgcaaatatctagggctgggctacacaaagggaactgagagatagcccacccttccgtgcaaattttattgataagagtgatgtggtccagagacatgagacaccttgtccaggggtggttaatggtggagcctgaaggatgagcaggtcatgattctcagcacagaactctttttctcttgtagaaaagatagcaaataggctggatgaggtggctcacacctgtaatcccagcactttgggaggctgaggtgggcggatcacttgaggtcaggagttgagaccagcctggccaacatggtgaaaccctgtccctactataatagaaaaattagccaggcatggtggcatgtgcctgtagtcccagctaccgggaaggctgaggcgcaagaatccattgagcctgggaggtggaggttgcagtgagctgagatcacatcactgcactccagctgggtgggagagtgaaactgtgccaaaaaaaaaaaaaaagaaagaaaaaaagaagagatagtgagatagtaaataggttttcctcctcatgccaactcagatcagttgatagtacctgccagttgagaaaatttgtaaggacgtagtacctaggtactacataaaacactattgctattaataaataattatcactatcagtaattattcattagtactgtctgctatattaacaccatagggaaatagaaaatgtttgccacctcctatcaagaatattctttaaacatattccttcaagataaacgttcaatatttattctgcctttcttgtatctctgtcactcacaatattacctaatgctatctaatgtattctgttcttagagaagtaaaatgtctcagtagaccaaacttagatttgatcattacgaaagatgtcattctcagtggctggatcttcatgaggttttcttgagctgtttttcatttcacctgctgctggatgttttaggctgctgtattcacatctggtggcctgtctcactaggatctcatggctgcccgggcagtgtcacagctctgagttcaggttggctctagtcttgcccttcgctacagaatcgtggaatacagtgggagatgaagaaggcagcactcttgccctttgtgtttctagtaacttaaattcaactcctggcagcctacttcacattctgatttgggcttctgatgttgagtgctgagggaagctttctcccactgcttacatgttctagctccttggttggctccaaggagttgtgatggaatttcttggcatacttcaagccagcagcagccaggttggccttttccctccacatcttatagctttgtaggattttgggagaaaactgacctggaactagttacatgacctttttcatttatttgggtcttagtgctcatccttgtcacctcttattatttagaatgaaaagcacattactctttaaggaactagagtataaattcagaaacctagaacacatatattaatacacagaactttttctcttttcctagctgttcaaatgtaatacagttttatgttcaaactaaatgaatgcctatttattcctggaagtaaattttgttattttctagtccaggctctttgttttacacatgacaaaatagaagcccagtacacaggagggttgaatgacttgtttaatggcacatggccaaagaaacagaacagaaaaaaagaaatcagaatttgtcagttttctgtctagtgcattccaaatcacatgacacaaccattattggttttagaattggaaaagtttggtttattttttaactgactactcagattttaaaaaaattgtttcattaatagattagtaaaaatttaatactgctgttcattgtagggcttagtaagccattactatgatagatctttatttttgttttctttaagtctgtactggacattgaagtctctctatggtctctggacttacgtcttggccttacagactgtcctgtttcacctttgcctcagtctttgcagtaatctccctcactgagaagtctggaacatgccacatgttcacagtgaggctgttaaaacttccagccccatccaaaacctagacttggaaaccattgtcgcattgctttctgagtccacagatagcaaatgtgacaagtcaaaaatgatgcctaatgttgagcaaggagtctttaaaaagccctactcatgtttctaattctcacacccatgtaattcacaggcatctgtccacaggtagtttgagaacctaactatattaaatttcaatattcagcaaatagctcataaccaatcatatctgaattagaaaagcatgtgtaaagaacaatagcaccaactagcactcatagcagattattccagctatgttataataaggcccttggcaataactcaaggtctgttttttcaaaatgtaaggattaggtgttcttgaggcaggaaagaaaaacaagactattctttgcagatggagaaaaaaatgaagtagattcactagcagagtcactttcatggaaatttggagctctgctgcacagttttagtgtttaaacaggattggaagtcctttgggatgacattttcaatgctgaaagagaaacacctgatagaattgagtctcaatgaaacagaaaacctgctgaattgaaaaggggcttcactcagtgactaattttctaaagtgagtaccccaaactgttaataactattttaaagcagttggatgactacattcaagataaaaaattatatgggaataaaaattgtcaatatatctgattttggtaaaactaagcacacaatttaaatttatcttggaaaaccttagtagttattggaattacttgagaatctattgcaagcaatctaaatgaattcttccaaaacatgtcactggagcaggtactcaagaagtaatctgaagtaaacaaacaaaaacaaagctatatttatccttcctcttttctgtgtaatataatccatgggaagacaagaagaaatttattttctacttgtgagatttggggatgatgatgctttttctatccttatcaccatttgtcaagatacaactttcattactttccagtaccacctttgaacagcatcttcttttttagtatattctcccttcctccttccatctctccattctttcttccctcctcttttcttcccatatttccttccttccttctttctttcattttctctctctttggaatctcttctcttaactttatgttttccccaagtgatcagctgtttttatacttctctgctggttcctcctaacagagtctttgcagattttaaagtaaaaccataaagaagaaaacataaatagaatcttcagtgatttcacagcagaaaggcatggtttgtattactttctctcagaggtatttttaatggggtaaatatttatttccagatgacccaaatctctttgttatgtttgctgacagaaacagcagctcctccttctttctctctacagtaatgagattatggacagggatagaccttcttcatactgctctgacaacagacattttataaaccagggacgggctatttcaattcagtttaattcaaaaaaataattattggatacttaccacatctaggatattgttagctgttataaatgatacaaagataattaaaacattgttcttcctctcaaggaatttgtaatctagtatgagggaaactgtgtaaataaatatccaatcctggatgactgccacaacataaaaacacacaaatgtttaggaactcggtagacaagcaaaggaagtagaatagtaaagatgaatgtctcctatttgtcaatattttacttcacctctgtgttgttttgggatatatcaaataatgtcttttaaatttagagttattgttactttataataattattattattgtcataggtagtgttaggttgtgtcatttatgtaaatacttatggagtagtaacatgatatagtagtctacctcagaaagagatttattgagtctatgatgctgaattatagttttgtaatatgtttctaaattctttatgatggagtcccactctatcacccaggctggagtgcagcagcacaatctcagctccctgcaacctctgcctcctggattcaagcgattctcctccctcagcctctcaagtagctgagattacagtcatgcgacaccacaggcagctaatttttgtatttttagtagaggtggagtttcaccatgttggccaggctggtctcaaattcctgacctcaagtgatacgcctgccttagcctcccaaagtgctgggattacaggtatgagccacggtgcccagcctgtaatatatttcattccaacttttagatagcttctttatcaggtgctgcaataaattgtttgccctagatcgaggtggggagagagccctcttaggatgagctgtcacacagtaaaagataagatttcctggatcagttttctaaagtgacaggcgtgtcccctaatcgagacagacagtgctccattttgacaaataggccagacttctacgtgtgcatatttgttttgtgtgtgtcagagtgagggtgaggttgaggagtcattctgttcttattggaagtgaatcaggcataaaagtgatagagcgcttgaatgagatgattgcagttgaaagacacagcaattaagcagatttcagactttagagagcatgtcttccgggagctatccacggtactgaactgcttctccctatattgtcctgtaaccccgcaaaacaaaccttcaaacattttaaaaccacaagacattttaaaaactggctttggttattccttactagacaaattctctaacctgtgtatttctaatacttgttatttgtttaatcttggctaggtcagcccatttttttttgtttgatattacacattcatccatttatttattcaacaaatatgtaggtacaatcttccgtatgttgggcagcctcctagtggttaaggtgcttaggtttcttattatgtaatgctaattattattacttttgatttttctgggatttactctaaggaagcagatttaatgattaaaataattctacttcgtgtgtgttgtttgaagaacttggtttctggcccaaagatgatgctttgtttacagtacctagaacagccctttggcgtatcgtagacactcaagaaattgtattcacagcataaacatgtttattgttgtggagtgattttctatgaaatgttacaaggaaaatatatattttaaaccaacaagtaatctttgcaaaaaaaattttgaataagaaaaatattgttctaagtaatctagatggagcatacacctagccttaaagagtctagaattgacatgttgggacattctcatatgttaagaccacattacaggttgaccagaaaactaggaagaaatagaccagatacttcctgctcaggcttttatgtgcatatagaagctcagtgatctttttattctgttttactcaggctattctgtattcaggtaggatatctatcacccttactcttctctaaccccatcttaaaaaacaaagcggcggggagtttttcttttgatatcagcaacagataaccaaataagatggcgtataatcttttttttttttttttttttttttttttttttttttgagatggagtctcgctctgtcaccgaggctggagtgtggtggcactatctcagctcactgcaagctccgcctcctgggtccacaccattctcccgccttagcctcccaagtagctgggacgacaggctcccgccaccacaccaggctaattttgtttctgtatttttagtagagatgggggtttcaccgtgttagccaggatggtcttgatctcctgaccctgtgatctgcctgcctcagcctcccaaagtactgggattacaggcgtgagccactgcgcccggccagaaggtggagtgctattcttaactgtccttttgtagttctttgttctaagaatttggaaagacaagttagtcctgacttccatggaaatgttttttttccaaccaacatgggtgtaattctgaaggagaattctttcttaccagtgactcagtccctctgcagggcacagaatcaacagtattcctagtgtttgcaagatcagtgattatatagggtcagtataggcaaactctccatttccaatccgttgttaatgaaatgttatttttggtgaagttctgagatagactgaatctgagcagaataaaaaaaagtggaatcagcctgagttctagcttctacccctatttctgtgatatgcttccttattgacatgtgggctttgaaacttggtaacatccaaattgtattatcactctcttgaaaatgtcattgttccatgaaattgtgagacttaaccatttttattgatatctcagagaaaccaaatcttgagaactaagagcattggaggataagctcctttcctagagatacttactctacttttggtcatggaccaaatttggagttattcctgtggatttttttctcttgttccttaaggcagtgatagatgcttgtttagtcaccataagttgtgagaatatgtggtctcaataaagacccagcaataccttgtttttctactcattatccagccccaaagtttaagatctaaatgtttcctggtgagaatacaaagaaaagtgagctcttatagcctgttgatgggaatgtaaattagtgcagccattatggaaaatagtagagaggcttctcaaaaggctaaaaatagaactaccatatgatccaacaattgcactattgggtatttatccaaaggaaacaaattcaggatattgaagagatgtctcctatttattacagcactattatttatttatttattgcagcactgtatatttatttattgcagcactatttatttattgttaacactatttatggcagcactattcacaatagccaagatatagaatccacctaggtgtgcaagcatgaatgaataaagaaaatgtatgtatacagaatggcttactattcagccaccaaaaggaatgaaattctgtcattcacagcaatatggatgagtctggagggtatcatgttaagtgaaataagtagggcatagaaggataaatactgcatgtccttacttatatgtgagagctaacaaaagttgagctcatagtagtagagagtagaattgtggttattagaggctgtgagggggagggggaagaaaggagagggaacggttggttaaggaaaggagaggagaggttaagaggttggtgcagggttatagctgggcaagaagaatactttctagtgttatgtggcactgtagggttaaatacagctggagatgatttatttatattttcaaagatctgggggagaaggttttcaatattcgcaacacagagaaatgatgaatgtttgaggtgatagatacggtgattaccctgatttgatcattatgcattacatacatgtattgaaatatcactctgtatactataagtatgaataattatcatgtgtcaactaaaaataagagggaaaagtttcaaaacaatatctatttgttgattccatctgtatggcttagtgataatgtaatcttttgctgtcttgcattgttcccatactggatttcatgactaatatctttgcctttgactgatttgaataaaaatatgttaaatgaacagagaatcttgacctcctttcagaggctgaaggattccttaatttctttcctccatttgcttaggaatcagtgccattgactgtttgcttttagttaatacggttttgtttgcttaatacagaatatgtgcaatttaagtgtcatatgtacataataagatgtaatcttttaattatatgatatagcataattatttccattttatatatgacaaagttaatgtttaagaaagttaaataactctaattaggagtcaggattgagaatccagacacagatggctctgacatcagaatcactgctttaaaccactcttcttttctgcttgctttaatattcctttacttcctccataaagtgccacatcagaatatagaacaggttattaatggaagaaatatttcaatattttgagttttttgggtgaatgaaaattatagaattaaaagctgaacatcattttatttggcagtttcatcattatgatttaaaataaatgcagtttttgaagtttcctaatttattctcttgaaatatatttggattgccacatgctgtatattctaacacttggccctggtagggtttatttgtatatgtgtgggtgtactttaaatataaagatctcactgattttaacacacattggaaatatgcataggcaaaccccaaacaactttttattcaatagtgtccatgtatctctaaacttttgatagaaatttgttccaataatggggttactacataagttgaagaaagtcaaactgaagcaaaatttgaaggcttctatattaatgatcagttttaggcgatacttgccaaaatctagttcaggattagaataggctgtgttgacattttaagtgagacatatcagttactctttttcagaaagttaaaataaattctcataatgaaaaaataaatgataattttagattcttttagagaatttactacctttacaaattaggaaaataatattcacagtatccatgattccaaccagttaacatgttggtatatttctttcagttatacacatacacataattaacatataattatatgaatttatatataattttgcattctaactttctatttgacataataacagtcttattttgcacttttatgattttccaatgagatatatctattagccatttctattttttgagttgcctgtttttttgtgtatgcatagatatatgtacgcctgtatatatacacgtatgcatacatatatatgttttttgttttataaaaagagataccatatttctattaataccgtcacagctctgatccttctttctattgtagagcttctatgcatgtattaaaatttaatttagaaccaatcaaggaagaggtcaatctgaataagataatatttgtaaagttcttgcctgtattatgtatagcaactagagctactttatccacagcgatttgaagccatgttgaacctatacaggttaattgatgcaattctcttggaaacatcgtcatctgttggcctataatgttttaaaaaccttggaacagtctcattgttttaagtatatctcctagttttttcctttaatttgtttgatgatatttttattttcttaagatcatcttcagctgaatcctgacaaccctactacatgatcataacaaaaaaagcaatgaggagtctctataccctttattttcataggaaaatattctaatatccacaaatgtgattaaaggatagagcaggtggtggggcgaggtaacatctgatgtgagaacgaagaagcaaacagttgttatttttactctggtcaggtgaaaacaagcagtcattacatgtctaaatcttgggtatctttggaatcattttcagccaccgtagtaagttgtacgtgcttgagtgtttttaaagcatgtcttatagtgaccaaatgtttctaccgcatttatctcagtaaagttgacaggattctattaggacgatcttcacctaatgagataaatattctaattgtaatcatcctcttggaatgcatatctcttctgggaattaaaagtgctttaagtggtgttgctaaacaaacatttctaaagagtaatcataaagttaaatgcctcacaatagcacaataggctttttagttgacctggtttttaatacttttttcattgcaaaatttcttattctggaaagtttggaaaaatgaggaaaaaaatagaaagaaaaatgtcgaatttaaacattttgtcactacctagttaaaatcggggataacattgtgatttagatttctccagtctcctttctttttttttttttttttttttgagatggagtctcgctccatctcccaggctggagtgcagtggtgcgatctcggttcactgcaagctccaccttccaggttcacgccattcacctgcctcagcctcccaagtagctgggactacaggcacctgacaccacgcccgccaatttttttgtattttttttttttagtagagacggggtttcaccgtgttagccaggatggtctcgatctcctgacctcgtgatccacctgcctcggcctcccaaagtgctggggttacaagtgtgagccaccgttcccggcctctccagtgtcctatctcaattcttattcaattgtttgttaactagattggaatcatactgtgcatattgttttataatttgctgttttggctgacatttggaaaaattattttagaaaaaacagccagttttgtagatgaaatggtgttttgtttctattgatttttgatttttaagttgctattacttcatgaagttagcgtctttcttgtgtattggctattctcttttcttttgctataaattgtctgctacatcttttagttcataataattattgagtcattttctgtttaaatataaagtatttttctcatttgtcgctgtaacataatccatttttaagaagcagagcattttcttgacagagttttgaaatattgtgtgactttatggctagaacacagaaacattagttagaatttcagaatcatttgatcagctctggctttgagcctctgattctacttgtagtctccaaaccaatctttggtatccttctgtagagatgtaagttgttatcaccaactcaacatgaaattgtaagaatttataacagtgttttctaaaatgatttctttgatttattcaaagaaatattatctctgataatatatttcagtatttttcatattgctcaatatcagacgaaagttcttataaaagtcctgattgtttcagcagtgatttgcatgccattagcaggtcattcatccccttccactttgaggctcaagttctacactagatttgatttgttggagggagtctacaaactctgctttcactagaaagacatgatctgtgtgctttgctgccatagtgggcctatccacatggctcattctctgtaacactaacttccaggaaagctcttgtatcaaaattcatcaccggtattaaacagtgtcaattatttttatcacctgttgaaagcttaaatgccaacagaaatttgtgcttcacagggcattgggtcctccatttatatttttcaaatgtgtagtatactcttgcttttagtcgtctattacccagtgttcttttcggaaaatatttttaaagttaattatatactcacagataatagtgcaagcaagtttcctccatgttctgctttcctttttctgactttacttcatgctacattccttcacaaatagtaataagaatttatttctactcagaatgaatgttcctcacagtggagagaatttgccactacaaaatgccttctactctgtgtttaaattcctcgtacatacaagcaggttttgggtgttacatttgttcatagaggtatgaaattgagagtcatagattgaaatgttttttatagtagagactcccaaaaaaaggcacagaaaaatggttgatatctagtaggagttatttacatgctgctatttctgatgcttcctatttgtttcttctgaaaaagtcgcccttcctatgtctcaaaacagtacacctgtaaaaccacatcctactgggcataattctacaactgcttctattctcaatgcttgtgttgcatgcttttggaccctaagagaaatcagcaagctataaacccaggaccaagaagagcatatatctcttggaaaaatagcatttgagtgattgaataaaacaggctgttttggggatcattccaaatgcagggaacaatatggatctgtgatacttgagttgttggactttgtagaatatcaaagatgttctgcttttcatattcagatttttaaatagaaggaaataaacaatttttaaaatgtttggaattaaatgggggaggtcatctgtaactgtctttgttgatttttgtgggcatcatagcacagaagagttctcctggcttagcattctggtattgctcacatatcacctatatgctaatttgagagcgttcatgagtgccatgaaggatgagtcagaatgatagacagtatgctgactttttctcctcttattgaatttagtctgatctgctagtgagagaaataaaagggaaataaagcagggagtataatagggaaacctattttctccaaatgttgagatatttaaaaagtctttgttcagtgtacctgcagttataatctttccagagattcatgagatgtcagggctaggcaagactttagaattctatgtagtaaactcttgtttggggctgggaaaatggagggtcacagttagaataattgcctaaagccacaccgacagagagctggtagtggaatccctgttttctattcaccttcctactcagttgcactacaagtttatcctaattcaagtaagcttagacatcaccttgggtaactttctgatttaccaaatccactagtggaccatattgaatttgcttccaacatgaatactcttcatttctctccatccacactgctacccaccaaaatcccatgccttgaatgtaaataatcttagagctgatctgtttgcttctgtaacttcctgctactcattccataagcaacagaagaggcaaaatgaccttttaaaaagtataatttgatcattattctcctttacttaaaatcctagaatgacttccattgcacttaaaattccaaatttctttccatggcctaaagggtctacttgatcagtgtatcgcctttctctagaacttaatctacctctgacccttgtgtgctatgctgcagccactttggcctcctttcttttccccaaaattgaagacacatttccatctcagggcctaagtgtttgcagttagctctgtttggtgttctcttctcctagctgtttacagctttcagccttctgcagagatgttccccagctaccctgccgaatatcgcctttccccacccaatcctttcattaccctattttttcatagcagtaactactaattaattatgtctttatctattgtcttttcccagtctccaactagattgcaaagtccctgagggcagaggtcttgatgtcttttccattaacaatatctcgagtaaccaccagcaatctgcacatagtaataacctgaatattcctttaatgaatgaataaactgaaaaccctaaagttcagtaatactggcctctgtgtagagtttcagaaatatgccaaatatgctttcaagcatcccagcctgtctagtgtatcctttgctctcttggccttctgagatcacttttaattggcatcctctgaagttgttactctcagtcatgctggttgataccccgaatggataggaaatggataggcattttttctgtccatctctaaacatctctgattgggcctaatatacctctcaggcctgctcctctggccaggacccctctttttatgggaagtagggagacccaggaacacagaacctataatatattagaacctgttatatatctctctagaaaaaacagttattttaaggaacgtgattgctggggatggcaagtcagaagcctgtagggggaggcctgcaggctggaaactcaggtagcagttgatgctgctgttttgaagctgacttttttcttctatggaaagcctcagttattgctcttaaggcctgccaagcaatcggatgaggcacacccacattgaagattatctcctttacttgtggtcaactgattatagatgctaaccacatctaaaaaatgccttcatagcaacaccttgattagtgtatgattaaataatgggacatgatagcctagccaagttgatagaaaactacccatcccatcatgcatttgtggtattggagaaaggaaatgcttctccattgttactactgggactgttactgctgagacacaccgaagaggagaatttttagtttttagtttgctttttagcagaattcaaacttaaatataaaattaaccaaattgtcagaaaggactgaaggttatcctttcaattctgagttttttatgtaaaattattttattattagcaacaggttttgaaaacatttatcaattatattcttatatattggtgactttaggtaatgaataaatctggatttatctttctttataataaaaatatggtctgatcaaagtatataaaattgaaataaatattgtcttatttgtgctttaaattaattgtagtataatattaataggatattatataatattcagtcattttagaataggagaaacattttagggtaggataaacaagaccgtatcatgaaattggagattttaattgttttgtaatattaaattttacctctcatgaaaatagagtagataattattatggattatgaaacagcataattagttgtaacagttttaccttgaagaaaatatatcttttttataagcagaaaacttcattttgttttctttaaaatgaagtgaataccggccgggcgcggtggctcacgtctgtaatcccagcactttgggaggccgaggtgggcagatcatgaggtcaggagatggagaccatcctggcttacacggtgaaacgccgtgtctactaaaaatacaaaaagttagccaggtgtggtggcgggtgcctgtagtcccagccactcgggagtctgaggcaggagaatggcatgaaccctggaggcggagcttgcagtgagccgagattgcgccagggcactccagcctgggcaaccgagcgggactccgtctcaaaaaaaaaaaaaaaaaaagatgaagcgaataccatctctactctcaatgtatcgtggacgataataactatgctagtatttctgcatagtattcttaaagaattctgactgaaaatatttaaatgaaatacacataatcactttgccacctaatgcccatcaatcattgccaacattgacttttaataaagacacataaccagagatgatttttaaaaattatggataaattacattagaaaatttagctggagcaaattatatttgattattattaacctgccataatttatattcattaaattgccaaatcttgattataatagtcaaaaagaaaaggtacatgataatgatctagaggtagaacacatgctatcaactggaaaactaattgttcagcatcctaagtgtatttgttgcttaattatatatataatttctacaacaagtggaatgatttacatgaatgtcaaataactggtttataaatgaaacctgatattaagctaaataaaatattggcatatagtgttcacttatgagctaatattcttacctctagcttcatttacaaattaattatgctacaaatatattaatgttccacaactctttcacacttccatcaatatcgagtttattccattacaatgtgaaattaaaaaaaactgtagaataattacttctgcttcagaaaatatagattacctatcttccagtaagatgctgcaatttatttagataactgcatttattgcattgattttgaaaaattgctcaacctaataccctttcttctttgctaattcctggggaaaaggaatccttttcattttgatccaaatgaccattaatcatattataaagtgtaataattaaccctttttttaagtgtcagagacacatgaatagtgattttatttggtttcaataatcaagtaaattaagtgataaaatggaggccataattaagtgatcttgttttctaataagaccaacccattaatgtgcatgtaaagatgcctgtcatcaatttaacagctttctgagtttaatatacattaagagttttatttttggaacaacttagtaatttttagaaacttgagtacaagtgttggcaaaggttctataaaattctgtctacagaatatgtggaacacaaccttgggtcgtatctccaaggaaaactaccatgattaaaaagacaatgctttgtcaaattcacttgttatcacaatctaattgtgttaaatgccggccacattctgagtagacactttaacttggcttcccttgggaaataggaaatgaagggcccgaaagaactagaagctgcctctcaattttctttcaacatggcaaaagcatttgcatttatctgtgcccctctcttggctacactctcagctttgatacactacttgagcatgtggaggtttacctactgaatgtgacccttatatgaataatatgagacttttgtatcaacagtagtgatggtttttgtttttaagtcacattttattgtatgtcttctctacctctcactatatgacaagtttagtgaaggcagggtctgtggctatcttgtttattattgttttatatcctgggggtatcacagtgcttgatcatagaaagggctcactaaatatttatggaaggaaagagaggaaagaagggagagtgaaagaaaaaacattcaatgttctcactcttaaaccaagaaaataattgtttactttatttcattgtagtaagaaaactgaacatgctactaccttcaataaatttttaagtctgcaatacagtattgttgaccataggaacaatattgtatagtggatttctagcatttgtctttcttaactgtaattttgtgcccgttgtttagtaactctaaattttcctcttcactcagaccctggcttccccccattccacaatttgattctgtgaatttgaatattttcatagaaaacattttatgagtagaattatgcagtatttgtttttctgtgactaacttatttcacttagcacaatgacctccaggttcatccatgttgttgtatatttcagaatttccttcttttttaaggctcaagagtattcgcgtgtgtgtgtgtgtgtgtgtgtgtgtgtatcacattttctttattcatctgttgatgaacatttagtttttttcacagtcttggctattgtgaatactgctgcaatggacatggatttttaagcgataaagaataaagctcttttcatcttttaactggaattattttttagaaaatattttgttccaattttatgatttttttgctattctttcatgattaaaagttatgtttcattattatcaggttgtatatttacatatatattttgtctgatgttaataatggcatgtttactttctttgtgtaagctgatgtatggaaaatattttcctagcttttatttcacattatttcatcttttgtttcaatcattcatcttgtatattttggcttccttcttcccttttactcaacttagaattttagagtgagtaacttttaagataaaacgagtttaacagataatttagcccattcacatttgttgtaattcatgatatttgtgtgtgtttgttatctcttcatttttgaattattttgctttttaatacatcttttctccatttcttctgcattaccttccttctttattattaattgaggttttttgtgctgttcttcttccatcttttttaaactaatgaattacaaaatttgcttctttttatgatttgtctcatagttattgttaaagttttgagacctgtgagtaaaaatattttatattaatacctagacttataaatcagtactaatatcttgtcttgaacaggacttcatccctagaatactttttatttctacatcatctgcttttaaataatcagatattaaatccagattgccatcgtttcatttttaaactttgcagcagagatttttttagatgtgaacataaggtgtctattttctttgcttcttgttattttgtgttgtctttctctttcttgggtaattttttgttttgttttgttgaatcagtaagcttttcagaaaatgcctgtaggtgttaaatttctgagcagttatatatctgaaaatatctttgctcttacatttggttaatactttggctagatttagaatttaaaattatgaaatgtttttctacagacttgtgaagacattcaatatttgtttcagcacatggccttagaaatgggatatctataccaatctaattcccatgtttctgtaagtaatatacctgtttttatcttctctgagatattttggaatttgctcattattcttggagttttgaaatgtcatcaaaatatgtctaagtgctggtcttgtttagtaatcttgtatacctcaggggaaatttcagtctaaagatgtatatcttttccttcagttttttttttctctctctctctccatatatatatatacacacacacacatatatatacacgtatatatacgtgtatatatatgtgtgtgtgtgtatatatatatactttttatgtcttattagacaaacgttaggatttctgtttctgttctctgtcttaacttttttatgctctccaggccatcatgtgcttgtcctataatctggaccaaacccaaggtacacatttgtagctcacaaattcttcactagtcaccatctctgacttatcctaaatgaaattttattttatttttaaagtgattatattttaaatgtttctttttataaaatgccaaccagtttttcttaatggctgtaatgtattgaatcccttaagctagttcattattcctatttcaagatttttttctactccttctattaattgtttttttttttttttttttttgagaactagttttgtgttgtttgcattggagtagcatatacaagccattgtttctgacccgagtgctctcttttagaattttttttttttttagggtcagatcccctcatctagtacctctgcctttaaccgcagtctcatgaatccaactgctattcagcaccttcgactcagatgtctgataggcctgtcaatcttgggagacccctagctgaacttccacagaaggatgggtctgctccttccctagtctccccatatcaggagatgatggtacccttcaccctgtagctcatgccaaccttggattcatcctgatacctttcttgtcctacattctacatccaatgtatgaacttgtgctcacttttatgtccaccttcaaacaaataccatatctgactgtctctcaccactccccagctacatccctaatccaagtcaccatcatctttcacttactctattgcagcagcaatagaccaatctgggctctgcttccattcttttcaccctatgtttattatgtattcagcggcctcagagaaatgtaaaacataaatcaagttccatcactccctgcaaacaacaacaataacaccccttataatggctttaagtcctaagcatgaccaatacagccatatgacatcaaggtcctgcttacttctctgactttctgttctataatttctataatgtctatcattgttcactgtgtttcagtcatattggtcttcttgctattttggggagtatgttcccacctcagggcctttgcacagctgtttcctcacctagtagctctttctctagatattacttggcttcctccctccctttaattgtttctcacacaaaatgcacctcctcagaaaaggattgctctcatccagttatcatccactgtccctctttatcccttttccctgccctttttcttaataacatgtaacgctgcctggtgtgaccaagataggtttgtttgtgtttgttgttgttcttcaaaatagaaacatgaccagggtatgggactgatgacttctccaccagcatatcctctgagggtgctgaatcatttctgttacatagtgggtgcagaggaaatatttgttacatgaggctatatatcaaagggcttcatgaaggttttgctttactgtgaatctggagtcagataattcttttctttatttctcctctgttttctttgtagagatcatgaatatcttaagctttatggtgcctctctctctatagtttggctatgagcctccccgaggcagatggttaactttatttagaaagagggtttcaggactttattctagtgataaataccgtggctgctagtcatagaataaacaagggcatgagagaaggcagccaactagaccagctgttcacaccatggtcctttcataattatcctggttactgcctcttggctgtgtgtattgcttgactccaagtgtggggtgtcttttgtagagctttatctggagctgttttagggagaatcaatctcacttctagtagatttctcctgtgtaagtgtgggctttgatttcctctacttctatttctactaagcccattacttatattaatcccatctactttcaaccttcaaggacttttatttttcaaatttctgatctgatagttaaaattttccccgatgtgccatgcacttattctaaaatatgatttttttcctggtgtcaataagatttggcgtacagggaaagacagatatatatgacttaaattttgtcttctttgcctctattgtatgttactgtttttatcttctgtgttgttgttgttgcttaacaaatgtagctacacatttatatcttatcactgttttcttaaaaataatttgttttgttcttctcccttttatatttagaaaatatataaaaaatgtggaccatgcctttgatcagaaattattatgaaaattgttgtttagaatgggtttgagggtggaaaagtttattaagagattgtaatttaacgaaagagaggtatgaatattctgagaattgaggtgtcttatgcattaattggattgctagatggccccactgatttcctgtttttcttgttgtgttaatctatatattgaattaagcacctcaaactatgagttattagatctcatatatctatatccctacagcaatttctctaagctctggtcatttctgctactttgtaatctaaaactgcttcataacttcctagatagaaatagaatatgtgggtgctcagagtatcagatagaccccatatataatagctatgaaatttcaggctctataatggattataggatatttttgaaccttggtaggttgtaggattagttgcttaaatacatagtaccatagattgcaaatgtttaaaaatcttgatgctggaatttattagaaaaacaggaatgaatacagtttgagaggctagaaccgtggatttcaaatgctagcctgtatgagggtcccttggagggcttcttaaaatacaagttgctggttgtcattttcagggtttctgatttacgaagtataggatgggcctgagaatttgcatttccattaaattcccaggtgatgtggctgctgctcctgggacaacatttagagaaccgctagattagacagtctcacaacagggatttctagggacagcttaatggttactttatgatttgaagctggaatacccaattaggggtttttccagtctcatttcatttcatttcatttgcttccttttttctttcttccttcctccttcccttcctcctccccttcctcctccttccttttttatctcctctccttgcccatcccctttcctcccttcccatcccctcccatctcttccccttccctcccctcccctcgctgctcctctcttctcctctttctttctttgccatttcaggtgctttatctcttaagcactgcactgctttgggttatccatttaagcttagaaggagagcaacagaaaaggaattgaaatgtaaagcagatatcaagagagcaaaatttgtcattaaattggaactagcaattaatttgtctatttattcatagtctaagtgtgattatcaaaaatgcttgagaatcaatagaaccacatgggtttttcaagttggataggaccactgaagctacctggtggaaacacatcattgtattgatgagaagactgaagcaagaatatgaaaagcatctgaaccaatgttttcttttccacgttctcatcactctctgctacccacagctgcccgtcatggatatactatatgttgtcagctatattttgattacttctctgtatatttatcatcatagtttactaaaattgttagtattataccttttgcatataagaaaggatgaacatttctagttcttaaaatgtaagaataagtgattacatattaccttgaaacagtatggaacactttttactttaaaatatttttttcaatttttgtgggtacatagtaggtgtatgtatgtatggggtacatgtgatactttggtgcaggcatgcactacataataatcattttccagaaaattgggtatcagttgcctcaagcatttatcctttcaattaatgctcttagtctgttggtattaaaacaatttttattttctgatgagaaagttgctgtcactttgatcattgactttgctacaggaattttcttttcttttcttttcttttctttttttttttttttttgttttttgagacaggtctccctctgtcttccaggctggagagcagtggcacaatcatggcttactgcaatctcaacctcctgggatcaagtgactcccctgcctcaaccccctgaccctcactatctgggactacaggtgcacaccaccacgcctggctaaattttgtattttttgtcaagacaaggtttgtcatgttgtccaggctggtctcgaactcctcggctcaagtgatccacctgccttggcctcccagagtgcggggattataggtgtgagccatcatgcctggccaggaattttcttgaatgcttcaataactttattccatttaactctcacaacaatcccatcaaatcaagtatcatgattatgcctcatcattcatttcacaaattaataagcaaagtcttagggggttatcacttcccaaattattacatgccagtgaaaaaccaaagtttgagcttgcacacaaactttgaaacactattcaaaagcagtgttttcagcacctgatctttattgcctcacagagttttatacagatacaaaattatgaaatgtagctggagccaggaactatgacatggaatatacctggcatacacatggtctttgtcttttcctacatctgtgaacttgttgaagctttagatgtcttcccagctcagtgatcatgaagacgtcctcactgatgagtcatctttacttgtcatctctagctacctggaataaaacacccagtgtagtgtctgggatccagtgggcatcgtgggtcagttagttctccagccccggttccttttctggttgcctgagcttggaaaattcataaaatctctttggacctcagttacgcaactgtgaaattgtgctatagggtgacttgaaaccactttgtagattttttgggagagctaaattaggtaatgcatgtaaaagcatttagtgcaaggtctggcacataggatatatttgctaaatattcgtagaatcagatgaataactctcatgaaatattttgttaaacattgtgattgttcactgggaatattatatggctgtgtgtgccactgtccgtgtttcccctaataattaataaatattaaataatttaaaattaaatattaaataatttaaaattaaatattaaataattaataataaatattaataaatacctttggcaagtatatactatgtcttcaaaatgtttcttttccatttaatgttttcatttatctgcaacatttcttaaggcttatttgcatgtgggtaaaattcaggctacaataatagtcaaggaagtatatttctcttgttctgctcccatacaaatggtgcccccctgcaagcctcttctgaattattcctggacacccaaataaaaatggtaatttttctttccttttctcctggattcttattctaacatctgctaggaggatccacaccctgtcctaggctagtagtgtacagaccatggttttgatgtctgtgcaaaaggtacaggtttgtttgcatctcttcaatttttttcattgtatgaaaatataaataatataaaatgtactatttttaagtatacgattcactggtattaaatgcatctataatgttgtggaactatcaccagaatccattgccatagctcctttaatcttacaaaactgaaaagttgaactctttacccattaagcaataactccccattccccctcacttaagccccgggcaccactattctactgtctgtttttatgattttggctattcaaagtacttcatataagcggtatcatgcagtggtatctcatctttttgagactggcttatttcacttagcataatatcctcaaggttcatccatgttatagcatatttcagggtatttttcctttttaagactgaataatcatccatttatagatataccacattttgcttatccattcatccagccacgggtacttgggttgcttccactttttatctatcatgaataatgctataaacatgaatgtacagatatctctttgagtccctgctttcggttcttatgggtatataccccgaagtagattgctgcatcatataataattctgtgtttaaatttttgaggaatcaccatactgttttccacagcatctgtaccattttgcattcccaccaacaatatacaaatgttccaattcttcgcattctcgccaaaatttgttacatgttgttgcaaaagtaattgtggtttttgccattaaaagtagttacttttgcaccagcctagtatttttttttctgagtttttttttcttttgttagtaatgggtgtgagtggtatctcataatttttatttgtatttctatagttgttattgatgttaagcatcttttcatgtgcttaccagtcatttctgtatctcctttggagaagtatctgtgtattcagcgtttgcttattttcacattgaattatcagtattttttgttgttgaattttaggagttctctatatattctggatattaatttattgtcaggtacagatttggctttgatggcactaaagctacttcttcttaccttcgaagtcacagtacctgtaatgattgcttatgtttagcaaattaacatcattaggctttctctgtcattatataaccccttcatcctaagactcacacatgagcacctcaactgaggctggggatgtgtgtccctgttgttgggggaacacatgtccttagctctgactccctttctccagggtcatttctatcctctcttccgatgacggtctaccccacagatcctaagccacatccaagtcacctgaattccagcatgattcttacttagattcttaagtttaaatgcttgtaattccttcttcctttcctctccttattaagtacctttaaggaagtagaaaactctcaacatttagaaacacttacaagcatatgaatttccatattattaatgcctcgtgaccaagatgtcctgacacatttatatggtcctgtaaaagttttataaataatctggagcatattatttctttatatcctcactttgtgaactagacaaggtagatattaaaattccaagtctcaggaagtttgaatgatttttcttaagcttagtcagctaattaggagcagaatcaggactggaatttagggcttctggctccactttatctctgaggcttgtactattctactgggatatcattagaagaaatgccaaatgaatgccattgcctcttcagccctaaacacaaagcccagttaagtgtttccctgacatttttcctgacatctataaaaattcatattttatttttattcacatgctgattgatttagatgttatgaaaattaaataagttccaaaaggcagaagataggctatacacatatttttaaaaatttgtcattgttcaaacaatattgaatataaaattgaaatgtccctcattataaaaaaaaattctctaagagtgactagttataaggttatatcttttggcatgatgcacctctaagcagtgcttgcataaagtctctaccaaagctgacagagcttccctaaggcctaaagaacttggcaaatgttgttgaacaaaaatgacaacaatgaaactgtgtaggaggattctgcattagtgcacctaagaatgttctcgctaatttgagcacttctcaccatggaataatgcttttgttcctctctgtctttttctgctgtctcacagagactcctaacagggctccctggaccaggcttagacatcaatagggatggactagaggcattccatggaggtgacaattacagaagatcagaagtgcctagctacacactctattttcttctagcatctgaaattattgacttgaacccatttgtggggtcactaagccaccttcatataatatttattacatgtgcaaagtcagaacatatggagagcatttgcatttgaatgggggaaacatgctgttagataaattagaaaatctttatatttgcatttttctttatttaaaaaaatcaatctgtggtatagtagagctaggaatattccctttttggttgacttcttcactctgtgtttaaactttctcagcattgaggcatgtgattaaaaggagctattttcctaatacaaacaaaagcattgaacatcctgtgaaacaaaagttgttcattttaacttgcgttatatggaaatgtgacatgttttagatttgtgtaagctcatgtacttgaaaatcagacttgtctaaaatttcttttgtaagatattagagaacttttgaattatacctcttatttttgaatgtacattcctcagagaatcatctttatgcacaaataatgtttattttatatttttaatctactttagcagacccacctgattcttctacatgtaaggttgaaacagttttgagtgataaagaactgattttatggagcaactaatgattttgctgttgctacttttgtgccagcaaatacgtaatccacaagaatgttataagaaagatatttatcaagcctctaaaaaaaaagaaagtaatcaaaagataaggatgcataaatatcttaagactactcatgacatcaaggaaggtgaatcagtattaataattcactagtttgtgcatacttattgtcaggtgctgggtcaaattaaattggaatgatttgttgacatgaggatttctgggttcatgatggattcacattaaaacaatttttatgttttaagccttctcccatcaaataggttttacggtcttgtgtacacattacatgagggaaatagtactttaacattttacatgctggtgtatagtctatatcagcagtccccaacctttttggcaccaggaaccagtatcatggaaggtaattttgccatggagtggggttggggaaaggagatggtttagggatgaaaccgttccacctcagatatcaggcattacattctcataagaagcatgcaacctagatccctcaaatgtgcagttcacaatagggttcgtgctcctatgagaatctaatgctgccactgatttaacaggctgcggagctcaggaggtaatactcgctcacctgctgctcacctcctgctgtgtggcccggtccctaacaagaccattcaccggtaccagtcagtaagctgggagttggggacccgtgttccacatgttataaaaacttaggctgggcgcggtggctcacgcctgtaatcccagcactttgggaggtcgaggggggcagatcacgaggtcaggatatcgagaccatcctggctaacacggtgaaaccctgtctctactaaaaatacaaaaaaatagccgggcgtggtgggcgcctgtagtcccagctactcgggaggctgaggcgagagaatcacttgaactcgggaggcggaggttgcagtgagccgagatcgcgccactgcactccagcccgggcgacagagtgagacttcttctcaaaaacaaaacaaaacaaaaacttaaagagttatttgagccggacacagttgcatagacctgtagtccccagctacttggtgggctgaggcaggaggattgtttgagtccaggagttcgaggttgcagcgagctatgattgtgctacttacactccagcctgggtgacagagcaagtccctgcctctaaaaataaaataaattcggaaagaattatttggtgattcaagtataaaacaaaatctatcagatatttgtgaaaaacatattgttacattgttacatgttttaagaagggaattaaactcctagactctgtatggtataggagttcaacactataggttggtctatacatctaatgttggatatgtattttgtgccttttatttaaaataacatacattttatggcatttcttgctttgcattaattactggccatacccagaatcctttccttcgaataaaataacctcttttcccaaacttttacatattgttcatattttcaaccccctacacagttgttaggtcttgaatttggaagaattaaagggaataacattaatgacagtgaactatgaattaggaacctcaccctatcaatagccaatttccctccttttcagttttgtgtctcagtaatagtccttaaaacaacaaatgatacattaagtgacctgagccaatttcctcttgacatggaactattcaacaaagcctcacataagctaacatttcctaattagccccttaactgttgacttgagaaagggtttgcaatacaggattcttatatattaataaaaactataggtaaaaaattcaagatgttgttgaatctttacagttcgactcattattcaaattcttcatctttacatcaagtttctcatctttacattcctctaattcaggtcatctccacaatatgtccaataaaccgtatttgcaagatatcgggagaaaagcgagtctgcctctaggaattataactgatacttcctttgtgtgatgaacagtgatttttatgtatttagtcatatgctattagggaatagatatctctagatcagagaacagattgtgtattagtcacagaacatcttagcactagttcctccagccctagttcctgtggagtaacgcgatgagggccagatatctatccccatgggcagcagtgttgcaccgcatgagaggaaccctggaattatgaaacttggagcttacacagggcagctgggcacatctgcccttcctcccctccagagatagaaagacttgtatgtattctggcatgtaagcaaatgactctcggggagagtaaaaagatgcctccaggttttatttcatgagcatatggctccagaggagacgcatctctaaacctctcaggaacagttcattgtcttttacttctgagacatactgtccattcagtcattctttagccaaggttgccagtactctttgctaagaaaccccagatcatgcagaaatgtgaacatgttcacagagaattgtctctcaatcaatagtacctagtacattattatacaaagttctggggatgtttggcagggattgaacccatgaactagaattatgagcattggaacttatctaaaccaattagcaaataaaaaagttacacatttcttgagaaaataattttatagattaataattacatgtaggatatgcatatctcaagtcatctgagggtttaatgttttgtatactttatcttacaaaatagattccaattcatgctgtctggatatacaagcattaaggccttccaaaggcaaaatcaggctaggtgtgaaacatgagtggtatacggaggtatagcaagtagtgtcccttgatacccttggggaattggttccaggatgtcccagagataccaaaatccatggatgctctagtctctgatataaaatggcatagtatttgcatgtaatctagcccactttcctgtatactttatatcatctctatattagatataatgcataatacaatgtaactgctatgtaaatagttgttttatttgcattgtttagggaatatgacaagaaaaaagtttgtacatgttcaatacagatgcaatgttttggaatgttttggggcatatttttgaatccacagatgcaaaacccatacatataaagggctgactgtatttaagttcctcattctggtgtgattaattttatctctttttagtatacttgtggttctcaagtcactaatgttttagttataaggtgaaaggcacactgtgtaattgaatgctaaggccaattctttacctctgatgtctggaataagagccagatttcccatccttttatggaactacaagcgtcatggctattagcaatcccagaatagttctactcccactttggctgagtttaagatctttttctaaagacagtaaaaagagcatcagaaaagcatttgtgaggctgaagtacctcacataccaattttgtgggcacatttttggacccttaagttctttttgacagttttataaactcatgcccagagtagtttcctttatttaatatttgtcttaccctctacttacaggaaatgcaaggctcatcagctttttcagggagtagcatgactcagagtctgatgtacttgaaaaaaacacagcgggaatccaaacacacttatgtcatttttatgtgttagagagaaaccaggaagcatgaattctcacttttcttaacgtctttacagtgtcaaagggatatttgtgaaaagaggttgtgggaatcattgttctgaagtgcatccaagattagaagcctggtttatgtgtgctattttgcctcccagtatgagcagcctttttatatttattccaagtattactgtaaactactttttctttatacatacacaatatatctttgtctgtgatcagagcggagcttcatttccactgaccaatagaagggcatttttatttgatttaagtgaaacttggggcataatgcattctttcaaacctctgattggacatgacaaacaaaaagcttgagctagaccatggtcatctgaactatttccaataacttacctttgtaattggagtattgcctcaaatatttccctgaactctaattaccatggatacgatatcactcaacagaactttttcttaggagcactaagagtgtggaagacagaggataaatgttgtagtttcatttgattatctctatgtggatgctcacatttttttttctataaccaaccagtttcattttgatgagagtgtttggagagatggttatgctgacactagcctaggtaagagagtaagtctccctctcttaaaaaaaagtgacaatgtcacttctgctcacagtctgttgatcaaaatgaggcaaacggccaaacctgatgcctataggttgaggaaattgtgtatttgtgaatagtaatagcacagcagccactaggcctcccagtcgtactggagatttctaaaaggcaaagtgtttttagtttgttttaggtaataggttgatatttagcctattaaaaaggcagaccctggcttgacagacaaaaattaataattaatttgggagccagatacagacttaggttttttgaattcttgtttctatattcttattttggaagtttacagtttggttttatatgcaggggtgttagatgaaggtgtattgttttgcaaatagaaacagtctcaggagacaaataacaatggcatgagaaatttatgaagtttatttttagcagcactttcaggcaaggttttgccatcaatattttcattggtacccaagaagccaacagaggaggccatgttttatgaattgatgtggctacaaatattagctctgacattttttaagtgaaaaatggcagaaaagatacagaagcaaataaatatagagtctctgacagccagcagagatggaaccctttctaacaattatgaccaaaggtatgtgtgtgtgtggtagtttggtttatacttgcttgaatgctgtccttgttcttttttttttttttttttttttttggtagttcttgcaccaagtgactgatggcttcctccaaaacaatgtcagcaggacaaggatgtattggcagggtatcttttgaatcagtaaccccatactgatccttgacctaattaacagtctgctataggcatcttgcagtttactgctactgctatcgcaacatcaagaaaatgttgaaacttaagcacccataagaaacttaagggggtgtcccactcaagtcattataaattcagttttattatgctaaaattgtgtgaactatagttcacacaattcaggctggctggaagcctgaatactacattgttttatattataccacatttattggaagagttggtttgcttttaaaggaatccatcactattagtttcatggcgtatttaacatctggtcaggtcagttcaatacttggaaatgttttgatacttgaagtttccagcagattttaacacatgcctttggatgtaagtaaacacctttgtccacaataaataaaatgtaactgagcaaatgaaactgtcacaatgctttgaaaactgtagcatactgaccaaatctatgccatgattttaccttctactgatggaaagaaaagtaactttgattattgcaatctgggcaattcacttatgttatcttatttaactttcatgaaaatcttcatatagtagctatcattattccatttcaaaatgggaacagaagcttaaaaatggaataatttaaagacatacaacctagaagaggcaaagcttctgaatacaacagctatctaactccaaaggtcttggttcttataagaatccattctgttttatgtctgtgattgtaagcttttagcagtttctcttcttctatttctttttttttatattttttattatactttaagttttagggtacatgtgcacaacgtgcaggtttgttacatatgtatacatgtgccatgttggtgtgctgcacccattaactcgtcatttacattaggtatatctcctaatgctatccttcccccctcccccctccccccaccccacaacaggccctggtgtgtgatgttccccttcctgtgtccaagtgttctcactgttcaattcccacctgtgagtgagaacatgcagtgtttggttttttgtccttgcgatagtttgctgagaatgatggtttccagcttcatccatgtccctacaaaggacatgaactcatcattttttatggctgcataggcctagaaaggtgcagaaactgctttcaattcctgaagggacttgtcaggcaaaataaacatactgaaaatagctttgaccatttctaaatcctttcctggatcagagttggaggttgctcctacattcatacgcattgctgatggattctcatcaatggcccctacttctgggttggctgagatcaataaatcttagcagtttataaatggaagaaatggctttacatatcttgtttcctgaatccctttggatattttaaaagaggtgattaaagtaaatttatgtttctgcagatgcatgtaaagctaattgttttaataacagtataattggcgaaaggaagttatgtgtaataagaaacaaagcgtaccacttccaaaatattcacattagacatttgttaaatttgcagtgagtttcagcatacacacatacacaacacagaccatatgtgaacattaggaagattgatttgtttaaaaaatccacttctacaccacataagtaatatttcttactgagagtcactgaagtgaggaagaaaaataaccacataacgggaaaagaaaaacattaaatttagttatattgtatatgttttgtgtttattagtttttattaattgtaggcatgcaggtaaaaaaatcgcctcatttgaaaattaataacccagggcacaaactattaattaaggcatatagcaaatgccttttaaaagtattttatactggctgggcatggtggctccgcctgtaatcccagcactttagaaggccgaggcaggcaatcatgaggtcaagagatggagaccatcctggctaacatggtgaaaccccttctctactaaaaatacaaaaactagccgggtgtggtggcgggcacctgtagtcccagctactcgggaggctgaggcaggagaatggcatgaacccgggaggcgcagcttgcagtgagcggagatcgcaccactgcactccatcctgggtgacagagggagactccatctcaaaaaaaaaaaaaagtattttatacttaagtttttctagctgctagtttaagagagatgagaatacattcaaagagcagggaaaggagagtgtctgaacagaggaatttctaaaaatgagtacagtattaacacagttatccttacaatagcctgaggtcaggactattgttttctccacattttggatgaagggactgagacacagagaagttaagtaacttgtataagatagagaagagacagacatgaaactgttataaaaaggaaagagacaggaaaagaggagaggagagagaaagaacaaagcttggatggcaagttaacttaggtcatctacctttgaaattcaagtagtctgtaacttttgccattacatttagaggcaccctctgtgacacggtcatagaatactggttcactcttaggcattcaacaaatgcctattgagtgtcagtcatttattcaacaaacatttactgaatgtctaattaagtagcagatatagtgctagttacttgagctacattgcggagacagggcctctttgaagagcttgtgcttcctctccatgaatgctagattcatgctttccacctaaaccctacttttggaaatcaagaaaagttcacctccttcatgagacttcttggattaaccccatagtctattttcacctagaaatagaaccctgtttttgagtcatgcacgttgccagctgggataaaaggctacatttcctagtcttatacctaggtgaacccatgggtctcaggtcaatgggatgtaaataggatttgtatgagaattctgggacatcctccaagagagcagattcagctggcaggaaaggaatttgctttctgatatggtttggctgtgtccccacccaaatctctacttgaactgtagctcccgtaattgcaggagggacctggcaggaggtaattgaatcatgggggtgggtctttcctgtgctgttctcgtgatagtaaataagtctcacaagatctgatggttttgcaaaggggagttcccctacacatgctccctctttcctgtcgccatgtaagacatgcctttgctcctccttcgtcttccgccataattgtgaggcctccccagccatgtggaattgtgagtccattaatactcttttctttataaattaccaagtcttgggtatgtcttaattagcagcatgagaatggactaatacactttactacctatcctcctcctggcctggaataacatcactgggtgggtggagtttcagtcactgtcccaggacaggaggtggcctggagaatggaggccagtgcttaggtgtggagtagaagaatataaggggcttgcatccctgatgacctgaaggtcccatttcagccctcaaatagcctctttctggatttatttcatttgagagagaagcagttacatgaagtttgttactttgtttgagagataaatgcagttatattaggtttgttaattttgttttgtttttgttttagttgtatgatgctaaatccaattctaattgatatacctccttcataagataattttataaacccctggaaggaagattgttcattgggctttggcaggcagtgaccttaaaactaggaaaaactgagctttaagggcccatgaaagtccttggcttgtgggtttgctggctctttgctagaattatattttgtttttttctggttcagggtaccgtaacagaaggtgggaagctatatttttcatgaaactgattgcttttctaattaacaatcttgctaataaagcaccactgtacagcagatatagtgtttttaatgtcatggatattgtacctgaaagtaagtgaagaagtgtcagatagtttctgccaatatttgagcagtcttagttctaactgctacaattatgcaaggtatttgtcttagaagagcaatggccatttgagtaagactttccatatggtgttccacagtcactgggagaaaatgggcctttttttttccttagtgaggtgatcctctccttctttctctacaaagtaatgtggagtttggaatgaattctaatgagtgaataataggaagattttgcatactcatttggacaagataaacacaacagcatggttaaaattcttgagatgaaaggctgagtttctgtagcttgaattttagatgataaatatcaagaatctatttgaaggtcagctatcacaaatataatttttctctggcaacacttgggtagctttccttggcaaattttactcaaaaagaagataaattatttctgcctcaactttttcttttacctctcttcttctttctctttattcgattgtttgcctttgaaagtctggctttcattgcatcattagacagaattgtgtgaccattcccaaagagattgacagtgttcatggcaggctgtataggaatctttctgtgtgcaggctggtctacaatttagcataataaagatctggccttatattcataggatctagccaggaaaattagtcttacctcagggtttaaagaaatgagggtgtgtcccagagggatctgtctgtggccagcaggaaatttaattttaaaaactgaagaatatacaatagttcaggcactgaataatttgagcctgcgaaggtgcttctgccacatatattatcatagtgttagtaaggccaggaaggtctgaagtttgtatgagttcacagatattttgaaagactcatgcaggtatttttgatatgattccattttaaaatcacattgtctgtgatgtgtatttatggcattatctaccacatgtgtttgtcctgtagaatttacattacaaaaccttctctgatcaataattgacgatgagtgactgtagtagtttgggaaataacttgctttttactcttttgtcacctgcttcaatatagttcctgctgtttgatgagaattgactgagctggagcctgcaaaagtaactgtagtcaaattagttacattaaagggtcaaaattatagctgcgtggagctaaggtcatggcagaaccaaagagctctgggcacagatcttcctttcatgctcgactgggtccaataatcccccgaggctcaggtctctgattgcatttccagatggtctcctctggtgtaaacaccacccgcgctctgtccaacagcataagctaccctggcagaaagcaaaacagcaggtcagggagccctgggaattacacagtgggtggcacctgttgccaaattttgacctctctcatcccctacgttatatacccatgatattttcaacttacccctttcctttggtatttgcagggcaaactctctagtttcttagaataaagccagcttcatccactccccttcctaatctccatatattcttcaaactggtgcttagatttcctggctatcttgcagatgaattctaatatctactagtcagtagaatgcatttgtgtacttacacacttattattcaacaaatgcctattgagtgtcagtcatttattcaacaaacatttgctgaatgtctaattaagtagcagatacagtgctagttacttgagctacaatgcggagacagggcctctttgaagagcttgtgtttcctctccatgaatgctagtctcatgctttccacgtaaaccctgcttttgggaatcaagaaaagttcacctccttcatgagacttcttggattaacctctctcagatctgagcaggttgtccttctagaattgtcttaatgcatacatttgcagtcccttgtaaccttgttagactgcttctttcatgtagatgttttaaatttttcatagtgtgttgtgtacttgttcaaacgcaaactccccaagagagattcacttctggcaccttcatttttgcttttcatttcccctaatacattgctggacacttaattggtgttcaataaacatggtgaattcatttaacaaaagttattttgcacctaccatgctcacggctacaaatggacagcattatcacagcaactggacattacatagcatgcggaatggcagatggacagaccatatctataatatacttgggtaaaattttgaatgtttattagaatttcatccactgtctcatgtcttatagctacaagttaatttccaaatttgaatatgtccatacttgtttattaaaaagctggggacgatactctgtgagggtttctaaggagcatttgataaggtgtaaaaccactatagtcttggattcttctcattgctgagcagaatgggatgtgtcctgcagcaggttgagtggctctatgtggttttatgaccatacgtaggaacctgcttcttctcttgaaatggctgttttgttttatggagattggctagactggcaggtgacaaggcaagaggtgggctggccacgagagccagctgagcagtgcgagttggtgtgattcagccatttgtcaccaccatattctgccatagatagatattttctattcgagaaagtggatcaaatttcactgtacaccactttctcactaggctagaaatacatgaatggtggggcatagttcactccaaatctgatccatctaaacttttctttctggtgagttgatctgttttgagattttacactttacataaaaatagtatagcagccactctttgccagtcacaaaccacctttagctgagagtattatcatatcaattgtttcaaggaaatgacaaatgagtagttaccaaaaaaagaatgaatgaatgaataaataaataaacacaagggaatgagttgttactagacagagaagaaaaagattgcttggcatgtcccaatttggttattgaaaatttttatttttgatgcagtgctcttcttttttccttccttccttccttccttccttccttccttccttccttccttccttccttccttccctccttccctccttccctccttccctccttctttccttctgtaacttaacacctatttgattttttgaaaacattttttattagatgcttagatcagctgggacaacttaaattgcaagctaccagaaatatcatattaaactaaccagtgaagatgacagtttggatcatggaggtagggttgatttcagctgaggtttgctttagcagttgcaacactgtgatcaagatctgccttctctccctccatttcaatctagtttcctggccttggctctattctcagcaggtcttgtcttcctgttcctaaattggccatgagcatctcattccttattctaatccaacagggattatacctgttggtatacctactcctcctacttcctcccttagtctgtgggggaaaaaaaaaagaaagaaaagaaaagaacttctgagcttcaatgtgattaggtcatatgcctatcactgaactgatccctgtggatagtgatgggattttgctgataagtctcagtctcagcccctcccccaataccaccatccactttacagctgtggcttcactcaacttcccttgaaacactgtatggagaggaatggatgcctaaatgacaacttgggtgtcattaccaagaaaaagggaactatatgcaagacagtcaaaaactaattaaatgtcctctctaaggtttcatttttaagatagcacagagtttgctgctgctcctcctctttcttcttttttttttttgagacagagtctcactctatcacccaggctggagtgcagtggcatgatcttggcttactgcaacatccgcctcctgagttcaagtgattctcctgcctcaccctcctgagcagctggtattacaggcacacaccaccatgcccggctaattttttttgtttttagtaaagagggggtttcaccatgttggccaggctggtcttcaacttttggcctcaagtgatctgcccccgttggcctcccaaagtgctgggattacaaatatgagccaccgtgcccagcccacattcttcttaaagggtttgagattttttttggaaattacagggcatatagctttgtgctttattcaaaatgtcatagagcttcaaacagttcttcctgagacagatgtaaaacaattttaagatttctgagaagtaatttatatatccttataatagtcataccatgtgaaacctggcctgctaataataagaagaaacatctggaactagtgacagggtcaattttgggtattctctctctatggagaggactagttcttctgagattgatgttggcagtttggaatcttttcccagtgggaaggaagacttagaagaggatagttgatattgcctctcctcccacaagcaagtttcatctttatcacagttccctatggctatgccattttgagatttgtatacaaaccctgtacattagtgagggactcactcagagaccacctagactccaatcagtatccagcctttaggagatggcttgacctgggcagcttccccagtgatggagtttacaaaggatgacaatgaccatattttaaatctgttgttactctcttgcaagactcctctttttctcttgcttgctcttcaccttagcacgtctgtacacacctgcctttggtataacttgaaagacagccctaattgaggcattcatctcatacaatccaagagtcaggaacacagcttttggaaggaatgcattgtggattcttcagatgtgatttaatgaatatccaactgtacttagggactaaaaagagcatttttaaatgagattttgctctgaattggaaagtaagttgaggtgggaaataagccagccattaaatgctctagttttttttttttttttttcttgagatggggtctcagtctcactctgttgcccaggctggagtgcagcagcatgatcatggctcactgcaacctccaactccccatgctcaggtgatcctcccacgtcagcctcccgagtagctggaactacaggcatgtgccactatgcccagtaaatttttcataatttgtagagacagagtttcgccatgttgtccaggctggtctcaaactcctggactcaagcagtctgcccaccaaagcctcccaaagtgctgggattacaggcatgagccatcgtgcccaaccatagattttttttttcataatggcagagaatggctgcaatttagggtctttcttaggttcttcctcatccatttcttgcagaaaatttagtactttgtatttctttcaataatttcaacaattttatcctgacttttcccagagcaaaaattaggatggggatgttagagcttcctttgagcaggctatcatcgcaatgaaatcttgaccttgccccttgtagttgcctattgctttataaaacttgttattgaaattgcaaacagtccaaattatatagtagtttctaatgtactttatcagggtgtcagtttttcttttgcaagtgttttgaggagatcagattgttaatgaacattctttgagaatctgaacctgagaactgtctctttaggatgaagttaccaaggacagatgcaaaatttgcaaagatacggtgttccagcctcctccaacaaaggttaacaaccacccgagaaccccagtgccacttacctaccacctcttacctttggaagcagattgcccagtgacggataagtgtggaaactgttcaaagattgggaaagaaaattgttagaaaaggcacatagagaagagtgggattgggggcaaaaggagaaggaggatagtcttctgtgtttttttgattggttaacttaaaatctcagctatttgtttacacaaaggctatgttgatgtccatattcaacagatacaggtatttggctcagaaaagcacatggttcccagaccatttgccaaatgtcctatccttgttcagctttggttattatgaatatccttctggaagcaactgacacctaacatgtctgaatcctctggacctgtagagttcttaccccggagtgattacaatttctgaaaagaacatccctgcaaaattagctttcaaaatacgtgcagataagcccatagaactgggaattcctccagggaattatatcctaagtagcctactacaatgcttgattccttgggcaccagtggttgctcaataggttttttaataataaaaactagaaggaaagaactattgttagctaaagttaccatgtaataattggcttgggtatgtccctgcttgtttgaattgcttaatgtctgttctttgcacagcagaaactcttgtgccacttcctgattagtcatcttggtcttctgtttcctgagctgtgctccatgatctcgtgtaaatatatacaatttgtgataaaatcatcttgctcattccatagcaggtataagtgggttaattctattgggaaacaagctcaaattttaacagaagtttttctttgcttcaagggaacgagtttcccaacagtgggaattttaagcattttggcaaatcaataggggagatattttcaaaccagcatgattctatttggctcaggtaaaagtaagcccttctggactggcttgcaggtgggttcttgagtcttggcttatttaaaaagctgctgcctgttcttaataaatgccatgatatgaggcaccatgaacaagctggatttaaacctgccctatcaataattttactcataagttcttggcaagtatgtttgttgtctgctgtctgcctgtcaaggttgtcagttagctaagcatcagccaaccacatgatgctgagtccccatgattaatctgacttggtaatactgttcatctatgtaaagaattggaaaaagtagatctcccttcatgcgtgtgcgcgcacgcgcgcacacacacacacacacacacacgcacaccaatttgtttaaaataaaaaaagattagacgaaagcataaaatcagccctctggtctgaagcaattaatctgtagaagatgctacatatgctgggtgtagtggctaatgcctgtaatctcagcagtttgggaagctgaggtggcaggatcacttgagctcaggagttcaagaccagcctgggcatcaacacaagaccttgtctctactaaaataattttctaagaatagctggatatggtggtgtatgcctgcagtccctgctgctctggaggctgaggtgagaggattgcttgagcccaggagactgaagcttcagtaggctatgatcacatcactacactccagtctgtgtaacaaaatgagatcctgtctcaaaaaatttaaaaaataaaatgaaaaagaagatgctacgtacattatacacatataaattagtaaccaaatggtttaacaacctcagtgattgtgttgttctgtagtttgatgacttttatcttgctccttctcattgccattgattgtaccaggttatttcctggagcatgttgtatatcaaggtttatgcaactgtacatttaacctttcagtgcctagctttccccttttcctatagaatcacaagaatttgaaggcaacacaatatgttttctatcttatagtctgaagttaatgcatattaatggcatgctgctattactagttaatactgatgccatgaggattagataatcattgtaaaaaatgtttaatagagcattttttacaatacttagtggatgccagtatactaaatcctttatatatgcttaggtcttttatttcccacaaatctgtgaactaggaattatgaacgcattttacaaaacaggactcgttgcataacttgccaagtcacacagctaatgaacaggagagtcagaacttgaactcagggttgcctgcctctaaagtcctccactaattctcattcattctgtaaaaatagaacatggcctctagaatctcgtcatttagaaaagaacagccttttggagattggttagctggtttgagaacatgtagtttgtttatctgtgtctttgactagtaataacgttcagcctcattaaatctagtaagctaaaaggaagcaggaaatggctgtagtatagacgcttgatatttcagcgatgataatgatggataataatgtgatttcacagcttgggttatcagacccaggtgagtggataagtggattcagattcattaaaatcaccgggcctagtttgtggccttcctttcacaaaccccttaggctgcatattaccctttaatagcatatttttcccattatagttgcccttgctattcatttcaaccacattacaagtataaacatgtacaagggagaggacagatgtccttcccttctgtattaactctcttgttgtatgaaataatgttatgtattaaattattgtctcagtttatagagtctgctagactgtgctgttcagtagaactttttgggatgatggaaatgttcaatgtctgtactgttcactaaggtagcaactagttacctgtgttagttgagcgagcacttgagatatggatgatgaaactaaagaacagatgtttaagtttatttaacccatctaaatttaaatgtaaatacccacatggctggtggctaccttattggacagcagagatttagaatagtaaagctgaatggaccttagagtacatgtaaggcaacacattctttttattttagaggaatgtaggactcagagcatgaaaaggagtaaaaccaagcctaggatcctggtctcttgacttctagttcataatttcttccactaaacttaaaattgttaaaaatgttactttgaactttagtatttgaagattatcgtggtaagactttgcttatatttacaaaagcattgtaacagaaaataaattttgaattacaactgtgactttatcatatttattttacattttatgattgctaaataggtcatatattgacgtctttacatatttgttgggagcaaaagagttgaaagtaaagttttcttcccatctatgttatttagccattgattcccctctccaaagggatcagtaatagtttctttgtgtatctttttaaacattcagatatattaagtatttaaaactgtgtattgttctctcatctttttaaacaactggtaggatatgtacactacacattcatatttttgcattaaacttatatgtggagatcttttgatgtgagtacacaaaaagggtactttaaaacagatacataagcttctattgcacgtaccaactgtagtttaatgcatccctatcgatgaatatttacttcctttccaaagttttctcttaaaagtaatgctgtagagaataactttggacacataactttcatgtgtgcaaatacattataagataattcctagaaatgaatgcactaggtcaaatagtatatacacattttaaattttgataaatattataaattgctctccatagagtcacagcattttatattctcactgacaatctgtaatctctatgccttcatcaacctagtgtgttaccaaactgatcaattcataccattctgacaggtggaataaaatctcagtgtagtttaaatgtacatttttaaaaattgtgaatgagctgggcatcttacatatatgtaagggccatttgtattttatttattgtgaaatatgtttgtatgctttgtccatttccatcagtttttaaaattgacttagaggagcttttatatataagacaaaatatgacatatatggtaaacaaaatgcaaacattttcttcagttgtttgcctttttcactttgtttttcatggtgtttgctatggagaaaatataaatttttacataaacagatatgccaatctttccttttatagcttctggttttttgagtcaaaaattgagagaccttcctcattctgagagtataaaatagtaattatttttaattttaattaatttatttttattgacacctaataattttgcatgtttatggtttaccatgtgatgtcctaatacatgtacatattgtgaaataatcaaatcatggtaattagcatatcaatcaccttaaacatttatcattcctttgttgtgagaacatccaaaattctctcttctggctgcttgttggcagtagtcaccttactgttcaacagagtactagaacttattcctttctatgtaactatatctgctgaccaacctcttcccatctcccactccctcctattctccctagtctctggtaactactgtcctactttcaacttctatgagatcagtttttctagattctacatgagtgagatcatgttgtatttttctttccatgactggtttatttcatttatcataatgtcctctagcctcattcacattgttgcaaatggcaggattttatcctttttgtggctgaatagtattccattgtgtatatgtactgtgttttctttatccattcatcccctgatggacacttaggtggattctgtatttcactattgaaaatactgctgcaataacatgagcatgcagatgtctcttctatatactgatttcctttcctttggatatatacccagtaatgggattgctggttcatatatttttaacattttgaggagcttccatactgttttccacaatggtagtactgatttacattcccacgagcagtgtataggagttccctttcctttacatcctcgccagcataataacgattttaatatatttggaatttattctaaagatgtaaagtatgactcagacatcatttattaagcaatccatctttttcccagttatttgagatcccacctttatcacataaaaattttaatatatctttgagtcaacatctcactttgtagtctcttccatggaatctgcctattcttgcctgtaccacctgttttaattattttagattttatagtgtactttaatatattgaagaactattctctcattgctgcatttcttttttaggctgttcttcaccactgttacttgtttatattttgtatgaaatttagattcagcttgtctatttcaaaaacaatttctgttggtatttttagtaggatcatattaaagttcaagattgatttagagactttcgaaaagcattgaatctttctatctgggaacatgatatgcctttccatttgtttaagcattcttttatgttttctgtcagtgtttaatggttttcctccaataacttttaccatctataatttagcttattcctacattgttcttttttatgtcttcaaaatgggccttttgcatgtatgcatcaaagctattgacttgtattgattaacttgggcctcttctaaattttttcactttagaaaaaaaatattttagcaattggttattttatgttttccaaagacctaaatataaatgtacaggtgatgaactgcactttttcctttgaaatttgtatgcctttactttctttctctgatataattgtattcactatttcctccagaactagttaaactagagtagaaatttttggcatttttttggttcctaatcaaagttggaaaaacagacttttcccttgaaatgtagtgctggcatttaggttgagatagaaatatttcattatatgtttttaatcaagaatggatttgaatttcatcaaatactgtttaaacatctatgataataatttgaggtctccataggtttattaatatcataaatgaactattttagccttataactttaaaagccttattcttttaaagttttattcattctcctcccattcttgttcactattcgttgcccattcttgttctatataaaaaccccagtggtccctgctgtgaattcaatgacatcttatttcttttccttaagtcagagcaaatgtgcacatcagaagagcaaagtgtcaagtaatgatagctggaaattgagccacaaataaacagaaaatattttcttcattgttatttgtgtgtatgcttgtgcttctttttttcaagggagtagaccactgttccacatgttccacagttgttttatggtggaatgctctagttatggaaaaggagaatggagtctagccgtataaagttactaaacctgcttggatatgagtcaagggtatcctttttgtgcccaaactagaaaacctttccccttctcatatttttgagcaaggtgttttatgttgcaaagtagcccactgtctcttttcaactgcataagcccaaataacattttatattccagtcagtcacaaaatgaaaacaggaaacgtctttgaagcaaggcaaaaatgtcagagtgtctaaaacatagaagtacttggtgaaacactttcagcgtcttagctctgcctctggctagtcatttccactcgctgggctcagtcaggtctttcattagtgaaacagaggtggctgagcacttcctgtgaaatcgcagggacaggattgtggccctctggagagggggccaggaggaaaaggaaccagacagctggttttcgggagccaccagatgggagcaaatttccaaggctgctgagaagaatggtctagaataacagaattgttttgtgaaggagccttcctaaaccaaatgttctgagcgtccccgcaagcagagcaaatgagcacatactgtgttcatggggaaaaggacaaatgactgtacaaatggagtaacaaacaatttacgaaaatgtatgtggcctaaatttagtatcaaggtgatgggcaaaatgacttacaccaatttgtgacggtcctgttgcaaattcaatgacaaagccagccagtctacctagtccatagtatccagcagatatatcagtggagatggcccgagtgcaggctgcttaaataagataaatcatctgtgaagaaggaaaaggtcaaatgtgctattctctgtctttttttttttttttttggtctgaattaaatggaaaccattacaatttcttccaagaaaataaaaatcagcacctacaataatgctgtctccttctgaccctgccaagtctgactgcattccacctggaccctgcctttgtctctcatgtttttatccaagaataagtaggctaccttgtagtaaacaggaaatcttactcttacctcgcactagttagttatgcgtggtacttgatccataatcttctgcccccatgtcatagaagataggtttttccaactctcagatggaaaatcactagtgcactacacacacacgcactcatgctcagaaatattttcacagatccatttttctctgtgtgacggaggttacataattatatcagtggatgtcctgcagtccagctggtatatgtagagcaactgcatgtttgtatcactctgttaggtgcagtgtaggacacaaataaagagagagaagggagagaacactgccgagtcattaggggcatgctttcagttcctatacagccaagtttttttttaggcttggcctatgcttttttcttagtttgggtttagtatgtattcattcattcatattgccatgtgtgttcaacaaatattttgggatgcctgctctgtgccagacattgtgctaggttagagggatgcaaagacaaattagaactccttttctcaaggagacttctggttattgtatttgtgataaagttttaaagttactatactttgcctgcctagaatgtagttggatctcaaaagaattactgagggttggaggtttgagtggcagaagagcaatgattgatgaaacagagttttgaaagatgagtggcctatttgtcatggaggtaggaatggggggtgggtgggcttctggagagacacagcagaagtgtagagaagaccatggtacttgtagggaacttctgtggtttagagtgagatggatcttgcaagagctcaggctggagactgagaaaatgctaagtcatggggggtcttacacaacattctagagaatttagactttcccctgtagacactgaggggccgtgaacagcatttgtacctctgcaagatttttctggcagagacatggaaaatggtttagaaggtgaagataaggagctcaattagtgggctatttaaagtgtgcaatccacagataaaaggcaaaaacaaaacctgaatcagaagagtataccagaaaagggtgccagcctattatatatggcaatttatgatttatttaacattgaaggaaaaaacaggccttcaaaaataataaaataagaaggtgctagctatttacccctataacttcaggtacaagaagaatatttttattttactgagctcctcaactgatttaaaaaattaatactcataccagattgtaaataattcaaggaatcatagccccttccttactttttttacatttgtaagatttaaagagtcatacacccagataacatcaggctgcagagttttagagaccaactccttcagtgatttttcaagatgagaatgttctccatgttctcctgcagaagcttctctgggagccccaatatgtacaagagacagaggtagaccactggctgtgccttccctcctcctcctccccattctactcagctctgaattgcagttgcatagtttgcaaacttaatgttgtcaaaccttgttattccataatgggggcatagttgtgcaaactggaagtgattgatttacccagggacagaagacttggttaatagtagaaaaggatccctaggttccctaattgttggacaattgctcttagcagttttggttaacctggtttttatctggcttctcagtagagatgattctttcataagatcacctgcacacaaccagctactcatatatttgcttatatgtgtcatatctgatttatgtacattttctgtagacaagcttgttttaggtcatgtacttattacttactaagtgtttgttttctccatacttggggatctaaattagtaagcaacaaactgacttggtgggttcaactcaataatatccaatgaagccatttcttcccattcctaaatcctaatttagctgtgggaagtttggatcaatggaaattaaactccatatatgccaacactatgggttgataacctcttccaagaatcattgcctgaccatcatgttccttctacctgaccactccttcctgcacttttatcacatattactctaagggatcatgtctaactttttgtcttcctcaattagactatttcttgaggccaggaaatgcatcattttatccatagcatctaactcaatatctaatgtgtaataaactcttaatagaaatttacttaataactagatagatagtttaagatatgcccttgatgtagtcaagaagacaaaatgtatgggtacatttccttcttgtgtctggttcctctttctgcattgtcagggcaagttttaccctctaatttcttgtggaccagcagctgtcttaattgacagtcccaccaaaccctggatttcataggatgtcccagacaatgagaaatggcttgaagatagaaaattgtctgtgtcttaaaataatcttctataaattatgcgtattaacacagatatgtagcaaactataaaggttattttgctctgaagaggaattcagaattagaacttggatgtagcaggacacctctgttctcattgccataaagaaaaaaaaaacaccttttatattgaatttcagtgaaccttgcagccagcatctgtcccattaattttcatatacgagaacaatgtggcatgattactcaccagcaacagaagtagcagttttataaatcttatgttgtagtggctggaagggacagggttgtgctctcattgtttccatattctttgtgaaattcacctttgcagggggtggtttgctctttctcttccagatgtgcacagaaatatgccatgtcactaaacgtcatgtggcttaacatttctccaattttcagctaatctactgagaaagtagtaattttttctgactagtggtggcctacttctcctataaggctgtcttttacaatgagggaagttggcctcactttatttataaaggtgcacctaaggctggtgctttctggttctggggctgcttaatccaccctctgtttcatttgatcctatagagtttgggggagggctgaacaacagtttcattgacgtgattcagattcaatttgctaagaacctgattgtgtttatgacattaataagaaacactttaagccttttaatacgaatccccagtcactctgcttcttccctttctactgatgatactttgtgatctacatagtttaaactttcattacacaaggaaacttctactaccacttgatgtgtgtgtgaataggctatggggaaaaaaaggttcatttttgtttgagttttttacttttcataggtcattgtcaatgtggtaagtatgctctttagtgggatgatccaacactagggcttcatattcaatatcatttacagaaatagtaaatgtcaataacagctaatgttcattgagtgctaatcttccaggtactgttcaaagagttttacctattatcaactcaattctcccaacagccatatgatgttgttactgttattatagataaagccacttaggcacaaagagattaagcaactagttcattgttacagagttggaaatggaaagccaggtcctaacccaaatgctctgttgcgcacttctctgctgtctgcaggtgggatgagaggtgggtgctgagctgcctcctgtggtgctgttttgaaacctgcccatcccaaagctaagggagtatcgctgtgctaaagggttcagtcagcagccttgccagttcggaatcccctagaaccaccctccatgcatgtcatgggcagctctctgagatttctggtgcctcttactggcttgttaagttggcagatttttctccccatttgcttccttcattataaaattcccatttccattttgcctctaggtagaagctcatggaactcaaatgggaaatgatgatggtggattttcctgctgaaaagatgtacctcaaaaggaaaaaatagtgtatttaacatggagaaatgaaatcctccgaagggagcttcatgaactaaattacccagaatggccttactgtctgttgtcagcatttttctgctgcccctttgagcatcagtttactcactcatgtgtgggtcagctctactcatctgtgaaggtagataataaaacctacccccaaaaggttgcagtgaagattaagtgatgtcatatttttaaaaatgcctctgtaggctctggtacattccaatggcttggtgaatttttttttttccttttccttttccaaagggaattaaaaaaaaatgagagtgagttttgaggatcctagagcaagtaatcccagcactttgggaggatcatgaggtcagaagttcaagaccagcctggccaacatggtgaaaccacatctctactaacaatacaaaaattagctggatgtggtggcgggtgcctgtagtcccagctacttgggaggctgaggcaggagaatcattcaaacccgggaggcggaggttgcagtgagctgagatcacgccattgcactccagcctgggcgacagggtgagactccgtctcaaataaataaataaataaataaataaataaataaataaaacagcaaagcttctatgaattctccttttagcccttcatataagtctattcttcaggagccagtttatattttatggttagatacacatattaaattattggtatgtcagatatgattctattagtagtctccagggttcatagcttgttagggaaaatcctcctaaaaagaagttctttttgtctattcttcattaacttatttcacttgtaaagcattaaaatgggtcctctttacatattatgttgttttctaagggacaaatactagtggttattattacagttctttttttcatgtttggtacttcagtggttgattaactgtttcttaatcctgaaatgtggaggaggtttttgcaagtggttgtagcctggttttgaatgaaggtgaaaatgctctttttgttagctctagatcagcagaggtgaataagcatcatgaatttaggagactggcgtttttttttacataaaagttgctttgttgctaattagtagattagaattcctttaattgcattctgaccaaagacttttgggtgttcaggagggcaagttagcatgtgttgcatttgaatttatacatttgagacacattttcttactgaagctgatattcatgaagcagaaaagataaaaacttgtacatacctttttatttcttgattttaatgttgaagttctattctcagaatggattttataggcaacaatatgcacttaaatttatgatctgtttacgagacctcactgtattttgacagaggtcaaaataagggaaatcaatcttggttctcattccaaagagttttttttcctgatatcttaaaaaggctttattacattatgttgatatccatggcagagagttccaaagacatccccatgaaagggctataaatgtgaggtttgaaaccaaggcaagtcaagcagggtaagcaatcttttcacccaaggttttaaaataactgctgataagaccttctcacagattttcattcatttcttcctagttataggcaggaaattctgaaagcaggtgaattctaaaattaccttataacttgatttcagaatatagttacacaaagtgagaataactcgatgaggatgctgtttggatcttgagtactgtaagtcctgtggtttaattgacgagttgatggatttcttttatgcctaaattcaggctgaaaggcctaaaggccacacgaggcagtttatcacgagcgctattctccgtttttatattctggttcattaccagccccttcctcagtacttctatttatataatgttgttctggtcaaggtttatactaaatctcttttaacttcaacatccaacaaatatttttaaggactaatgtgtgcaaaacattatgctaggtgtttcctaaggcttcaaataacttggatgccagttttggactgtaagtgctcacaggataatagaaaaatcttgtttgcaaataactggaacataatgtacaatggaatgtgtcataaggggagtgcacacaatgctgtaggaattccaatgaaattcaccctcatctttcattgtattccctgttatttacctctccttaaaagaaagaactataagaactctacatcttttagtggcgatttcctagatagaaaaataatgaatattaaacatgatgtgttaggattggtgaggctgaagaaattctatgcattttgtcatttagtgaatatgtattgactgcctgcctattcagtgtcaagcactataggtggtaatgtatcaagaggttcatgaactaataataaaggggcacctctgtatttcacaaatatttgctgaatgaatgaactcattatattttattctcctatgtgattcctagataagttctgctacctaaaggaaagcacttatggaatccaaggtttggaaagggcttgaaagatcacattaataggtttcccttttatttgcctttttgaatctcaatatggaataactttgacttatccatactaaattgcatctcattggtgttacacaatctttccagtttttcaagattatttttaacttatgccaacaacatattaaatatcctttccatctatgggacccattccattttctaagtttacctaagactttaaaagacattaagccatcagagccaaaaacagagtttctctacttccatgttgatattctccttaatctacacttccattcattcaataaatatttactttcagggtgttcggatgagctatgggttacatagtgatgaattcagcagacatagcttctgccctcatgaagcttacagcctacaactacagaggatggggctgttgaagcagctaaaaaaccctaccttttctactattgagcaataaaagaaatgtttttcttgaatttctgagatcatttcttgccagtctttgctcatgtcactacctggaataaactcccttttatcatattgggttatcaacatcttatacattcacaaaagaccacataaatgttaccagctgcaaaaatcttattcatgtctgtgaaatccattaacatgtggcaccacttgagttgggctcatcacttgctgatttctgctgtcattatttgtgaatgtctaatttcactgtaagctcatactgtcctttcaaacatgaatgaggcctttaacattgttgtatcaatccataacattgaacataataccctgtttgaggaggcatgactatagaccctttctgtccaataataaagatgttggtaagagtaaataaaaggtctcatttcttgataaactggttagaatcaaggaggtctgagcatgacactagggttcctaaatactttcattctagacacataaaacctctagaagattaaattcagacaattttaaactttagatacacattacaacacaaagaaatgcactattataaattttaatgggggaaggccggtaattcaggaaactgtcagatctgaataatgaaataccagatagttcttatctatttacatactctgtgatttctaacactctgaacaataatatttcagggttctaaatattggttagatttttaaagttttcgaaattatataactagatgactgctctcaaaattaggccggtattttggattacacagagtgcctaaaagtgcatttttcctcctgaaggggaaagccatgtgcctagccaatattttcattccctaaggatccatggaattatgatagcttaccctcatcagtcacccaggctcccattggtgtgaattgggcaatgctgtttacatagcaaatacacttccttttatacaagggtccacaacccctgggccatggaccagtatcagttcacggtctgttaggaactgggtcacgcagcaggaggcgagctgcaggtgagtgagcaaagcttcttctgtacctacagccactctccattacttgcatcaccatctgagccctgcttcctgtcagatcagcagcagcagcaaattctcatagaagcatgaaccctattatgaactgcacatgcaagggatctaggttgcacattccttatgagaatctaattgctgatgatctgtcactgtctcccatcacccccagatgggaccaactagttgcaggaaaacaagctcagggctcccactgattctacattacggtgagttgtacaatcacttcattatatatcacaatgtaataataatataattgaagtgcataatatacataatgcacttaaatcatctccaaaccatcccccactgccaccctggagcatggaaaaattatcttccacgaaacagatccctatgccaaaaagttggggattgcagctttaatagactcagaggcatagtcttagagtgtaacaaatgcacaaaccttttcttttaaaacagactccagagggattgaagagagggaaccagtgataatctatatgcccatttcatggcagacatgctgctgtgtgctttccatgcattatatcattcatccaacaggcatctaaagaatatagagtcaagaacagttaagccattgccacaagatcacctagctagtaaatggctcaaactcagtgactcaaacccaggatttccaaccttaaataaggctctcactcccacaccgcacagctgcatatctgagtgtttatcagtgaattacattgatgtaaattcatttatgaaaatgtcaagatatcgtgagcactagtgcttttaggagagaatatttaactcatttcagacaacatatattaacttcatcaaaagtttgcctgttataaacctgtgactcactcttggtcaccatgatggtgcaacagctgtccactggacaaatactaaataatattttatccttgccccctatttcttatgagaaagccacaatgaacttccttttgtctctcatttcacccttaaagggacaaatagcattgcattatccttgaaagggtcttctgctgacccatctttgacgcttccatcacagggtgacgatgggatgtttgctgtatcacacttccctgtgctttcatgaatgtgttactggtgatgaagaatgccaattctttgtttagtagcagtttgctgggtctccctgaaaataatgtgtcagttaggctacctataaatctgagtcagtaatgtacttctctaaggtatatttatgttttgaatttgtctctgagcaatctgttggggggaaattttgctttaatatgttttataaaaaggtgagaaagtaataaagtgtaatgaagataagataaattttctaataaaataaaatatagaagtgttcaaaatttttgctttccccatatgactttgttttttccccaaatgttaccctcataacaggtgggttctgtctcttgatgggtatcaacacagtgaccacaaccgaggaggatttagcaagggaatcttactacttgtaacaaataagggaaacaccaggagcaattcccaaagcagtatctctccaagctggggggcagtcagattttataagtgtagggtaataaggtgtgatctgattggattctgcaatgaggtgttgtcagaaggcataatctgactggattttgccatgggatgatggcagagctcaatctgtttggatcctggatcctgccattgttgtgtctgcttttaattcagtccctactccttggtcagagcacttaggttccccctgtggttgcactcttggttcttccgcacatggtcaggttatgtgacctgagggtccatggcaactgaaaaacaagaggaactttgttacataaaaaattgaaccagatttgcctggcatggctacacaaatggatgtctctgttcagccttatttatccacagtttttcctcctgctgatccctttttcttgcctgtcctccctgcctgctcacttgctttctggcctctcttgcctctcttcttagccagagctgtatagggatttagttcagtgtttcctccttcattgtcattggacaatattcactcatcagctccaggtcacctccctgtcctcacctgtgaccagtcttccttccaggttcattgccattttcaaagtgagtctgcactctctcaccacccgtttgcttatcacccactctctatgtgattacttgtgatttgacatctgcccatgctactacaatgaaatggctttctcagagactatcatatgtctctattgacaaaaccggattagtgctgcttattttctgcagtatttactgttgttggacaccgcttccttcaactttctcctctcttggttccagggcactatactaactttggtggccatatactcagtgcctccttatacatgagtggaagtaaggggttcagaatgaaatgattcagtcagtctcataaagagataggacatctgtggagattaaagttctcagagttagtagtctcattgctttattccacatgatgttgacaaagaagtagaaagggaaagccaaatccttcaatctatattgctaattaaaaaatgattttcttttcttctttttagtaaatgtttgatggtgtcttgggagtagccttagtagcaaaaggaaatatttatgcatgtctttgggaaaatgtctttccattttctgtggttattgtatctgtaaaaattggacaccatttcttaaaaggattatgtgaaaattttatgatgcctggttggtgaaaggcagagtgtcctgaaatatctaaaatgtagaatcatattctttctattgttttgatataattagaagtgtcgattttaaaattacactgaaaggcattttatttttaacattgttttattaggtgagtgcaaaagtaattgcagtttttgcattgttgaaatttgccatttgatatgggaatacattcttatttttaattaattaatttattattattatactttaagttttagggtacatgtgcacaatgttcaggttagttacatatgtatacatgtgccatgctggtgcgctgcacccactaactcgtcatctagcattaggtatatctcccaatgccatccctcccccctccccccaccccacaacagtccccagagtgtgatgttccccttcctgtgtccatgtgttctcattgttcaattcccacctatgagtgagaatatgcagtgtctggttttttgttcttgcgatagtttactgagaatgatgatttccaatttcatccatgtccctacaaaggacatgaactcatccttttttatggctgcatagtattccatggtgtatatgtgccacattttcttaatccagtctatcattgttggacatttgggttggttccaagtctttgctattgtgaatagtgccgcaataaacatacgtgtgcatgtgtctttatagcagcatgatttacagtcctttgggtatatacccagtaatgggatggctgggtcaaatggtatttctagttctagatccctgaggaatcgccacaccaacttccacaatggttgaactagtttacagtcccaccaacagtgtaaaattgttcctatttctccacatcctctccagcacctgttgtttcctgactttttaatgattgccattctaactggtgtgagatggtatctcattgtggttttgatttgcatttctctgatggccagtgatggtgagcattttttcatgtgttttttggctgcataaatgtcttcttttgagaagtgtctgttcacgtcctacgcccacttcttgatggggttgtttgtttttttcttgtaaatttgtttgagttcattgtagattctggatattagccctatgtcagatgagtaggttgcaaaaattttctcccattttgtaggttgcctgttcactctgatggtagtttcttttgctgtgcagaagctctttagtttaattagatcccatttgtcaattttggcttttgttgccattgcttttggtgttttagacatgaagtccttgcccatgcctatgtcctgaatggtaatgcctaggttttcttctagggttttcatggctttaggtctaacatttaagtctttaatccatcttggattgatttttgtataaggtgtaaggaagggatccagtttcagctttctacatatggctagccagttttcccagcaccatttattaaatagagaatcctttccccattgcttgtttttcctcaggtttgtcaaagatcagatagttgtagatatgtggcgttatttctgagggctctgttctgttccattgatctatatctctgttttggtaccagtaccatgctgttttggttactgtagccttgtagtatagtttgaagtcaggtagtgtgatgcctccagctttgttcttttggctcaggattgacttggcgatgcgggctcttttttggttccatatgaactttaaagtagtttttttcaattctgtgaagaaagtcattgatagcttgatggggatgtcattgaatctgtacattaccttaggcagtaaggtcattttcacgatattgattcttcctacccatgagcatggaatgttcttccatttgtttgtatcctcttttatttccttgagcagtggtttgtagttctccttgaataggtccttcacatcccttgtaagttggattcctaggtattttattctctttgaagcaattgtgaatgggagttcactcatgatttggctctctgtttgtctgttattggtgtataagaatgcttgtgatttttgtacattgattttgtatcctgagactttgctgaagttgcttatcagcttaaggagattttgggctgagacgatggggttttctagatatacaatcatgtcatctgcaaacagggacaatttgacttcctcttttcctaattgaataccctttatttccttctcctgcctaattgccctggccagaacttccaacactatgttgaatagtagtggtgagagagggcatccctgtcttgtgccagttttcaaagggaatgcttccagtttttgcccattcagtatgatattggctgtgggtttgtcatagatagctcttattattttgaaatatgtcccatcgatacctaatttgttgagagtttttagcatgaagagttgttgaattttgtcaaaggccttttctgcatctattgagataatcatgtggtatttgtctttggctctgtttttatgctggattacatttattgatttgcgtgtattgaaccagccttgcatcccagggatgaagcccacttgatcatggtggataagctttttgatgtgctgctggatttggtttgccagtattttattgaggatttttgcatcaatgttcatcaaggatattggtctaaaattctctttttttgttgtgtctctgcccggctttggtatcaggatgatgctggcctcataaaatgagttagagaggattccctctttttctattgattggaatagtttcagaaggaatggtaccagttcctccttgtacctctggtagaattcggctgtgaatccatctggtcctggactctttttggttggtaagctattgattactgccacaatttcagatcctgttattggtctactcagagattcaacttcttcctggtttagtcttgggagagtgtatgtgtccagaaatttatccatttcttctagatttctagtttatttgcgtagaggtgtttgtagtattctctgatggtagtttgtatttctgtgggatcggtggtgatatcccctttatcattttttattgtgtctatttgattcttctctctttttttctttattagtcttgctagcggtctatcaattttgttgatcctttcaaaaaaccagctcctggattcattaattttttgaagggttttttgtgtctctatttccttcagttcttctctgatcttagttatttcttgccttctgctagcttttgaatgtgtttgctcttgcttttctagttcctttaattgtgatgttagggtgttaattttggatctttcctcctttctcttgtgggcatttagtgctataaatttccctctacacactgctttgaatgcatcccagagattctggtatgttgtgtctttgttctcgttggtttcaaagaacatctttatttctgccttcgtttcgttatgtacccagtagtcattcaggagcaggttgttcagtttccatgtagctgagcggttttgagtgagattcttaatcctgagttctagtttgattgcactgtgatctgagagatagtttgttataatttctgttcttttacatttgctgaggagagctttacctccaagtatgtggtcaattttggaataggtgtggtgtggtgctgaaaaaaatgtatattctgttgatttggggtggagagttctgtagatgtctattaggtctgcttggtgcagagctgagttcaattcctgggtatccttgttgactttctgtctcgttgatctgtctaatgttaacagtggggtgttaaagtctcccattaacaatgtgtgggagtctaagtctctttgtaggtcactcaggacttgcattatgaatctgggggctcctgtattgggtgcatatatgtttaggatagttagctcttcttgttgaattgatccctttaccattatgtaatggccttctttgtctcttttgatctttgttggtttaaagtctgttttatcagagactaggattgcaacccctgcctttttttgtttcccatttgcttggtagatcttcctccatccttttattttgagcctatgtgtgtctctgcacgtgagatgggtttcctgaatacagcacactgatgggtcttgactttttatccagtttgccagtctgtgtcttttaattggagcatttagtccatttacatttaaagttaatattgttatgtgtgaatttgatcctgtccttatgatgttagctggttattttgctccttagttgatgcagtttcttcctagtatcgatggtctttacattttggcatgattttgcagcggctggtaccggttgttccttttcatgtttagcgcttccttcaggagctcttttagggcaggcctggtggtgacaaaatctctcagcatttgcttgtctgtaaagtgttttatttctccttcacttatgaagcttagtttggctggatatgaaattctgggttgaaaattcttttctttaagaatgttgaatattggcccccactctcttctggcttgtagagtttctgccgagagatctgctgttagtctgatgggcttccctttgagggtaacccgacctttctctctggctgcccttaacattttttccttcatttcaactttggtgaatctgacaattatgtgtcttggagttgctcttctggaggagtatctttgtggcgttctctgtatttcctgaatctgaatgttggcctgccttgctagattggggaagttctcctggataatatcctgcagagtattttccaacttggttccattctccccgtcactttcaggtacaccaatcagacatagatttggtcttttcacatagtcccatatttcttggaggctttgctcatttctttttattcttttttctctaaacttcccttcttgcttcatttcattcatttcatcttccatcgctgataccctttcttccagttgattgcattggctcttgaggcttctgcattcttcacgtagttctcgagccttggtttttagctccatcagctcctttaagcacttctctgtattggttattctagttatacattcttctaaatgtttttcaatgttttcaacttctttgcctttgatttgaatgtcctcccgtagctcggagtaatttgattgtctgaagccttcttctctccgctcgtcaaagtcattctccatccagctttgttccgttgctggtgaggaactgcgttcctttggaggaggagagtcgctctgctttttagagtttccagtttttctgctctgttttttccccatctttgtggttttatctacttttggtctttgatgatggtgatgtacagatgggtttttggtgtggatgtcctttctgtttgttagttttccttctaacagacaggaccctcagctgcacttctgttggagtacccggccgtgtgaggtgtcagtctgcccctgctgggggatgcctcccagttaggctgctcgggggtcaggtgtcagggacccacttgaggaggcagtctgcccattctcagatctccagctgcgtgctgggagaaccactgctctcttcaaagctgtcagacagggacatttaagtctgcagaggtaactgctgtctttttgtttgtctgtgccctgcccccagaggtggagcctacagaggcaggcaggcctccttgagctgtggtgggctccacccagttccagcttcccccctgctttgtttacctaagcaagcctgggcaatggcgggcgcccctcccccagcctgctgccgccttgcagtttgatctcagactgctgtgctagcaatcagcaagactccgtgggtgtaggaccctctgagccaggtgcgggatataatctcctgatgcgctgttttttaagccggttggaaaagcgcagtattcaggtgggagtgacccgattttccaggtgccgtctgtcacccctttctttgactaggaaagggaactccctgaccccttgggcttcccgagtgaggcaatgcctcgccctgctttggctcgcgcagggtatgcgcacccactgacctgcgcccactgtctggcactccctagtgagatgaacccggtacctcagatggaaatgcagaaatcacccgtcttctgcgtcgctcacactgggagctgtagaccagagctgttcctattcggccatcttggcttcaagagcgggaatacattcttacatgtggttatgttatacatcattttaataggtatttctcacttgtttttgctaatgacttactacttgctgtttattttatttttattttagactatgaaagtgatgttagataaaaagcaaattcaagcaatttccttattgtagttcaaaatgggtcataaagcaatggaggcaactcacaacatcaacaacaaatttggcccaggaactaacgaacatacagtgtagtggtgattcaagaagttttgcaaaggagatgagagccttgaagatgaggagtgtagtggctggctcttggaagttgacaacaaccagttgagagcaatcttgaagcttatcctcttaaaactacaagtgaagggccaggcatggtggctcacgcctgtaatcccagcactttgggaggccgaggcgggcagatcatgaggtcaggagatcgagatcatcctggctaacacagtgaaaccctgtctgtactaaaaatataaaaaattagtcgggcatggtggcaggcgcctgtagtcccagctactcgggaggctgaggcaggagaatggcgtgaaactgggaggtggagcttgcaatgagctgagatggcgccactgcactccatcctgggcaacagagtgagactccgtctcaaaaaaaaaaaaacaagtgaagttgccgaagaactcaacgttgaccattctatgatcgttcgacatttgaagaaaattggaaaggtgaaaaagcttgataagtggatgcctcatgagctgagagaaaattaaaaaatcattattttgaagggtggttttctcttattctgtgcagcaacaacaacaaacaatttctcaatcagattgttacttgtgaggaaaagtggattttatatgacaactggtgatgaccagctcagtggttggaccaagaagaagctccaaagaacttcccaaagccaaacttacaccaaaaaaatgttcatggtcactgcttggtggtctgctgctggtctgatccactacagctttctgaatcctggctgaacaattacatctgggaaggatgttcagcaaatcagtgcgatgtagtgaaaactgcaacacctgcagccagcattgttcaacagaaggggctcaattctccaggacaacgcccgactgcatgttgcacaaccaacacttcagaagttgaatgcattgggttacgaagttttgcctcatttgccatattcacctgatctctcgcgaactgactcccacttcctcaagcatcttgataacttactgcagggaaaatgcttccacaaccagcaggatgcaggaaatactttccaggagttcatcaaatcctgaagtatagatttttatgctacagaaataaacaaacttatttctcattggcaaaaaagtgttgattgtaacggttcttattttgattaataaagatgtgtttgaccctagttataaaatgatttaaaattcatgatctaaaaccgcaattacttttgcatcaaccttaatatttgaaaattagtaaaattgcaaaaagaaagcccttattagctgttaataaatataaaatatataaaatgtgtgtgtgttaaactaagtgccttgagtatatgaagctatgaaaatgaagacaacagccttactaacattccatctcattattgttataactcctggttccatcataatcttgtttttccatcccaacagaatctgaggtgcagtcatttttgtgaagctgttattttcatcacaatgtgatctatacctaatgattacattacctgtacatctgaagctcgttcgtaaaccatcgtcccctgagagtatacctaacataggaaatactatatatatttggccgctgaagtgctataatgatgccctaaattacatatccctttctacagacataatttgctttattaaaaataacttctgcataactattgaagaataaaacagccacttatgcacaaggtgagggatatctgcatatctgagctagacaaaaagtatgtttgataatctattgtatgttttgctacaaaagcaaagtggttccttatgattggctgaaactctttgagttcttgttctatctttcagcaaatgaagatgctaattgtctttattctagccttttataacattaccttggctcttcaaagtcaaatggaacctggaaaatcgaacttaattccattttacatttttcccttgaccatttcccatggtggggaggtatgtgtctagatttggaaaataagcctgcttagttttttttcccagctcagtgcttagaaacaaccccctctagcaaaaccatgcctaggaaaacaaagtatccagctaggctttcaaggttacttgggggcaagacatggatagttacgtccttggaggaaaataaatacaaggcagtagatccaaatgtatttgtcatgcaaagaacattagctgagagagagcttccatatataggtttgcaaaactgagagcaaagccaaagccattcctgggttttgctttgtgatatagtctccaaatggatactattatgattaatctattctgagttccttaaatgctattgtaacaatgtcaggggccaagttcaagtctaaagtacgtgtatgatgatcatagctgctataatactcataatgctgaagacatagtaacaacaatttataataggagagcagttttgtgcagcaaaatagttccgtggagcagaattagatcatgaaaatgttgcatggtgggcatttagtcgtgaaagtataaatctgtacctaatgattgatgtgaatcaggtttcaaacctattagatgtgccatttaaccaggcaacatttgcccattatttttttgcatgaaaagtaattaccgtatgtttaatagttactgaattgtgactggcaggtgtgccccaccataataataatgatgacaataataatatcttcaacttcaactcactctccacaagtcagggcaaagagagaataaacaatgattatttggcgtgtttgaataatataaaagccagtctaggtaatttaaggcaaagatcactttcaaaagccagatttatatatttttccctcctccattcaaataattgtctcagagtcccatttcaacttattttaatagttacttcctgcatatctgtgatgggttctcaaaaactttcaaaaccactttcacatattccgttacttagcccttaacaacagtgtcgaatagggtaggagagaaacattgttccctgtttttcatttagaaagccgagattcagagaggttaaatgactgtttctactccacaaaaagaaagaaatcagttgaattttctctgataaacctgccaacgttagtgatacgaaagtgaccacaccgatagagtggtgtcactgtcaatattattctgttggcaaacatattgtatctggaagtcaagggcaagaaaagaaagttagaaattgctgagataagggctgtgctaccgaaaaaacactgaaagggtgccccagctagggtctcaaacctatacctctccccttcagcctggtacttcaatactgagtagattatggtgcccattttgagggaaggctagtgttatctcattcagattaagttttgtgttggtgtgacacagatgggtttatataattaatgtcatgtcctagagggctgtgaacattcctacacttgaggcagtgttcaaaatctattactgtttttttttaattaaaaaagaatttgttttctttttcccctagatggaacttaaactcattgtatatgattgaagaggaacaaggagaaggagaaggagagaaacaacatacaataaagttgtccaccaattgtcccaggaaaatttgtttctcacataggggtcatcacaactgctgcattgcagtcagctggaagtataatcttccatgaatctgaagatgtgatgaaagatagtaggcacaggcaaagcctagctttaagaaaaacataaaatgaggactttgagaccctagggcctctttccttcttcttccccttgataggcaaaggcttttttccaaatcatctttgtaagaagtcccagacccacaatgaactattgaaataccatgatccagtaatgtcatcttcttctgctattaatatggtaatcattttaggtgatagatttcaccttcaacagttcttgaagaacattcagacagttcaccctgaaatgggtgaaaaaaaatcaggtacctcctatttcataaggatgtgagccaggatgaagcagtatgttatcaggcttggcatttcgcaagctgagtagagtccatgtgatcaccaggtataatgttatgctggagttgggtttcatctcttgcttgggtttggaatgtaaacaatcttgaaattgtatttggagagaaggaaaccctgggaaatgtttatttttaaaaaacatggattttttacaaaagcaaatacatgttctaatttacatcagggagcagatacctctttacttttttgagatttttctgagacattaaccttaagttatcacttgtgtgtatcaggagaaaagttgggagagtgggagagatgggtaaggaaacatttttaaatgtacttaaatctcccatgatttatttcaagctgtaaagcatttctaaaactcgagtttgttaattatcccaaggaaaaagaagagaggaaaatagtcaatctgatagactggtgacattccatgtagcctgatactaagttgtgacaaaatatctaacattcggccattgtttttgatatttgtactttttcttgtaaactatttgctctgggacaaaaagtcattggttttgaacttgatttgggcaactaaatgatatacttaaccacctgctttagcccgaccatgactttttaatgacttccattttatttggttttggaaattgatttgccctttaaaaataatatcagcatttaaagtaattttgcttgttttttgtttgtgtagtagctaaatatgctaagagaatgacttcaaatatgcagcctttatgaagatgtgaaaattgctgtgctctagctacaaatggcaattccgataacaagagcttgaatgtggccttgaggcaagggaaaaacagaaaaagtccactgaaagtcaactttgtccccttaatttgcaggcactgtggggagcagggaatactccatgggcacaggcatcctcccgagccatattggttgtagtgttgtctattatatctgcacagttcctcctttgattctttctatgaatcatgtgttagcaacccaagtagctgccattagctccagccatatgggtgaaggtaggggtagaggttgcagagcttaaacataggtatccagaaatcattggctcttcccatttcctgactgattctccaactatcaatctgcttgtaagcacattcacaccactcagtgcccctggtacataaaacaagagcagtgactgaaataagctctcaaactagcaaactgaacaagctatacaagacttcttggatattgaaaatactaaacattctcatagctatagaattaattatttggaagatattggcaagtaccttttcatgtctacagtgtccatctattaaatgggaactactactctgaaagtagcagtaagttttattaggggaagggggagaatcatcacaatcatctaaaactgttttgtttaatgttacctgccaagatatgtgtctaagaggctgctgtggctcccaccagccctgacctctgcacatcactgaacctgtatcctactgttaatgatacatatgtcatatttacaaatgcctcatgtgtctcagggtggtaaaaatgtttctattcaagaatggcaactaaaaacacccataggtccatcatattggattaaccacttatatccagctacctgaaactactggcactactcagaaaataaattttcttttaccatcttgcccacttaccgttctcagaaagtcctgcctttcctttcccttctttatccaattaacccaacttttagctcttacatcaaatcttctggaaagccttctagacatttctctcccttcctctctgccattatttctttttcaggataggttagatattatactgggcgctctcatagcttcatgggcatacccatgtcaaagtagccagcaatcgctattctaagaaacttgtctgaatttgtaattggattgtaaatatcttgagtgcaagatcttcaacttgtatagttgtatttccaattttcaacatatgttgagtgaatgtattctaaatataatattaagcatggcctatacctggtaatataaacatggaaatagaatgattatttaatttgtcatgtctgtgaaggacccttgatggtatctagtcttaaccctcaacttacagttgaggaagctgaggaccatagtgtattcattcattttttgtttattaattcatgaattcattcatgcaacacattgcattgagcatccatgtgtgcttggcactgagctagccactgaccaggtaatgctaagtagagcagaacaaaagacatggtccttccctcatagagcttacctcttagtgcagtagagacacagtaatccaatcatcacacaagacatttatactcaccaactgtgctaactggggactatggcagccaactgatgtgaagatttggcttaatggcaggagtcaggaagcctttcctccaaggtgtggtgtttgaactgaaatctgaagaaccagcagaagagcacaaggagggaaaggagtttgccaggcccaggccagtgggtttgaagccttgaggcaggggggaatgaggtgcattcaagaaactgaaaggcggaaagtgcaggagcagaagaatgagggactcaagaagaaagaggcagtacaaaataagaatgaaagatggtcaggggccagttctgtaggacctgtagccatttaaaaatgtttagttattaacttagaacagtgagagcactgaaatgtgtgagggtcagaagaactgggaggtggcctgataacacatgcattttgaagaatctctgctgcagtgtagagagcagattggtggacaattgatggactgagcagataggtgagaggtagccctactgggaagaatatgctgaagtgtgtgcaagagattttggcagcctggagagtagagagcaccactgacctctctgttttttctaactttctcaaaaatgctacgttcacctacatcttatcaaagaaggcctttatttacctatacttctagcatgctttgctttagattttcccatttctcaggtaagggcacagaggctaacgaacgctcctttcctggggccaaagcgttttcagtttgggcatctcagtaacttttggcaccactgctggctttaaggagcctgttatgtagtctatggtggatctgaataccaggcagacagatgacatttttataaatagtgtgaggaaaccccagaagtaatgtgaatggatgagagttcaagaccactgctgacctggaaagccaatgactgaggcaccagaggaagtaggctctcagagggaagacagaacaccccctttccagctcattgagagtgaagcaggtgcttttctgaagcaggtgatattctgaagatccacctcctcagaacaagtgttctgaagtttctctgaaatgcagagaatctaccatatgatatggttttgctgtgttcccacccaagtctcatcttgaattgtacttcccataatctccatgtgtcatgggagagaccttgtaggaggtaatttcatcatggggggcagttacctccatgctgttcttgtgatagtgagtgagttatcatgacatctgatggttttttataacagggttttcctcctttgctcggcacttcttcctgccgccatgtgaagaaagatgtgtttgctcccccttctgccacaattgtaagtttcctgaggcctctctagccctgtggaactgtgagtcaattaaacctctttccattataaattacccagtctcaggtatttcttcatagtagcatgagagcagactaatacaccatctgtaagaaacttggaaaaatgatttgtttagagttccatctgagcagtcatattattagtaagatatatatgtcgggaaaagaaatttacttcttatgactttttacattttgagatcttattgtttgatgctccacgttgagggagccatatttctccacctggtcaccaggctcattaggagggacagatgtggcctcacatttcatgtgcggttcttgtctcagcccttctttttctcaaagattcctgccttttgtctacttttctcaaagtgccatcttccttctctcaggctcttttgggattacccaaccaccattgtaggcaactctagttctataggcaactctagttctataggtaactctagttcagtatcatgactttcatggtttctataaaaattgccatcccacagccttcttcacatctgtgacaggcagttgagaggggactgaggaaaagtattgcccatacatggaatttgtggagactcaatcaatgttacttggattgagtaataaaggaagttatttgtctaagtttgggcagcaagagaatggcagggacagaaccaaaagcagtttttaaacgataatctttttttatttttttactattaaatacagcttgggggcaaagaagagggatacaatttgttgactttcattgctacatttttggacaaggaaagagaaacagagactcaggactgtttagaagtccaaatgctatttatttccccatactacaatggctgttgaaaattctcctataatatgctacaaatacaagtgtattagagagtttattgtgtatatttttgaacatagtgtaatttcttgtatgatgttaatacagttcttgttcttattctctgtaagagcttgtgttgctgttatctctagataggagcaaacttcataaaatgtagaattccctctgcatgcatagggaagtagcttttaaaatattagcctattccattgtttagttataaagtaaaatgattttttaaagtgcaggataagtgaatttttatgtttcatttttagttattgaattgtctaggtaatgcattttaggagggcactgttcctcccagaacttaggaaagcagtcattcaatcactcagtaatttttagggatttttaaaatagatataacaattttaggatgtcaagttttagatgtctagttttaacttgtttggttgagctgacatttaagttcagtcccaatgtgatgtgaatggacctagccttttacctcttctttttttcctcttcattggaaaccagtacagagaacatggtcacttaataagaaagatgtttcctgctttgtttccttttattcaactcagaactgcctgggggaaaagattgcttcctttctgaatgtggtaagccacaaaatggaaaatgtgcacacgagctctttcctattaaccttggggaaaggtgacagaaatgtgtgaacaatgctgttagctgtttaaatgttcttttattattattaatttggtttaagggttttgcctaacaagtaactcccttgatttgtatgtttcagagttgtttaatttttctccaaaataacaatttgtccttttgaaattctttgttagatttatgtcattccagtttcaatcttggtgatgattcttctatctgtcatgagtggtttaatctgcatgtttataattatagcatataaagccacataattcaaggtgggtcttggtatataattcctttgtactttttgggaaaataaggctgtaatggaagtaataaagatacctgagttgggaatgtttaggtatcaccaaatattagctgttcagaaaaatatccatgataaattagaaactgaaatcagcacatttttctggtttcggttcttttggggaaacactgttattttttaattcctggcttaagaattgtatttgattatgcgaagacaaatccaaaattttaaattctaatccaagaccttagataaattagggaattagggaatctgtgtatgtattttataaccatatcaccatatattgacatacctatgtcactgaaggtatattgtaaaagataatttggccaactgtattggaccaactgctcttgaactctctaagtacaattggtttaagatattgcctgaaatgactattttgcttatggtgtcattctttcatggtcaagatgacagttctctaggaatgttatttcatttctagaatgtcagccaaacagctttttatgatcctgagcagttatactctaccatcccaaacacacacacacacacatacatcttacacacacacacacacacacacacacacacacacacacacacacacaaataagccctgagaattttcagagaaattcatggtggaagatctgagattagaacccaggaactcctaagattccttggttttgtatcaaaggtcaataaagagacatgaagtcaatgaagtcaacaactgagggaaacatccctgaggaaatgcataatggaagtgctggtgtaactacctcaaataaatatttctactgaaactgatcagtcatccatttgatcaggtaaggcaggcaagcccacctctgattgcgtagtaattcactgatcattatcctgatttcagtggatctatgccatactcaagacctacatttgtcagtgacctgattgtcttattgccctacacagacatataatcagtccagcctgtgtgaaactccttgtgacccttatcatcatacttaagctgttttggtctttcaaatgtattcgctcttctttaccattttgaagccatcactctttcaccactgccagctagtcttagtaatctttcaccgtgcactgtctgttgcctcactgaatcctcacagtcattctatggcataggtaatatgattgtcattgacattatgttcataagggatccaaggttcagagggattgtattgttcagggttgcacagctaatttctagtaaagccaggaatcaacttgcgtctatatgattccatggtctatgcacttagctgtgatgtatgcgttctatctcaagtgatcacctctaaaatcaggatcagttcacagatatttgtgagtctctcaagagaactagggaaacttctgtaaagttagctaatggctttttaatgttatgtggtaattgtggtgaagcaattgtcaattccagttaaattagcttaaaatgataagagcaaacacatatctttgatgataaggctgggatagaggttaatgtctcatcaattttgggtctctcttagatgtttgaccttatcctaacaacttaagctttaggtaaagtctgcatttggtactctaatctcttcctatcagacacaggtgctcttctctgcccaactgcaattcagtccaagacatgccttctccagttagtctctggagaatgttgttcctacttagactcactgcatagatcttaacttgtactcctgctggtggtgtgcatatatgagctgtcacttgaccatgcagccacacctggagacccatttctaggttcagagtcatctctgatgcagcctgtaatttccccactagcatgccactctgtaggaatgaaccagacattgccacatcattctatgtagcattttcttaaaattagagcttcactataaacaatctttggtcaaggaaaggctttgttatctactccatggtctctttgagaaaaaaggcctggtcccattaagctcttgcctcgtttttgcctttcagggattattcgtgctctgtgttagatgtgaacttttggttaggtacataggaaatatctacctaagacacttgtgatttccaccaagtttgaaacagcaatctaaaagctaactcattcattaaatgatggaattgttaagttggtataaagtgatggtacaaaagcccatcagggcaggtttgaaatctaaatgcctttcagtatgcattgaacatgcgcatccatgagaaaatagtatgataaagaaagcagggtgtgaccttattggattcatatttccttatagaacctccaaattaagacaaatttccagacatttctaaaagcagcaatacaatcaagaaaacaaaacaatgagattcagtatgtagctactgcaaatttgtcagaaaataagtgggaaaataacaagatcctaggaaatctgttgtatggagctgaggaaaaggaatgagtttaggtttttctttaagttattgaagaaggcatgggattatcttctggttgctagtcttcccttagtttcaatgggaaacttatcagacacacttatcttgcagaagcaagataagaggacaaaagaatttggaagatcatggtggaattaaaaaaaaaggaatgtagtcagatggtaaatttagtctaattatatttagagatgggttaacataatcagaaggtaaggaacccaattatgagataggtgtgataacatagatggcttaataaaatacaaaatagaaagatataaatagaatgcttttatataaattctggaggagtttaaaaatgagtgagtgttcaagataacttagaaggaaagatattaatataaacttgaggtatgttggtcttgaagaaaaatgaaaaagctcattttgtgaaatgagtggaagaataccagctctttttcagattttcaccattttattaatattttttgattatagaattttaattatgtaggaaggaatttattaaaaagtaaacacaaaataaaaccaatcatatagttttggccaaattgttgcttttcttttacttcatttcctaaagggcatttctcagagtcacttgaaagtaaaacttgagagggttttatttttttgatttatttatttattttttttagtggctgtttgttgaaaaaccttgttgtaggctgctaggcattcttttactaagaatttcgaatgcacctcatgtgcaaaagactgcttaagtgtgtcactgcagaaactagcaggatttcaaaatcaaactcatcagttttctgtgataggatgatggtttgggagatactcaagaaaggagtacgtgttagtagctgaagatttttctgtcttcttccttgtgttgtcagatccacacttttattttccttttttttttttttgagacggagtctcactctgtcaccaggctccctgcaatttctacctcctgggttcaagtgagtctcctgcctcagcctcccgagtagctgggattacaggtacgtgccaccatgcccagccaatttttgtgtttttagtagagatggggtttcaccctgatggccaggatggtgttgatctcctgacctcgtgatccacccgccttggcctcccaaagtgctgggattacaggtgtgagctactgtgcccgtccttgttttccttttgtcaagaaagccagacattctgtgacacggtaaatgaaaaagggcttggacccaaccccagctctgttgcttgcttgttgcgttgccataagagaccctcaagaagaatctcacaaaatccactgccctcccttagtctcgctttcccactaaatcgctccatgcaaggggagccatttatattgcattaaacttttctcggtgttctctaattccaggggttcttactgcctgagagggtcactccaccatgtgggtaagcggggtgtccagagtctgcccataggccatcagcatcagtttttcaaatcctgggactttcactaaaaaactgtggttcttattttaaaaacaaaacaaaccaaaaaaactgcaaggaagcaaactccacaaaacccatcaaaaccccaaaattttcttaaccttaataacttgttctttttccatgcatatctaattcctccttttaaaaaatacctaaaaaattgaaattggtttaccacatattcctgttggcccacgacacataatgattaatattttttcctttataaaaaattgattgcttttactgtgacaactttgacaaagtctttcaaagagggagagaaatgtgaattcaaaaggataatgtggcttttattttttttactttgatcctgttttgtgaagcattacctaggttagtattgcctcatgttaatcagtgaccataaaggccattaggatgccttgatagatgcccttggtctcccttgactttgattgaagcatcttaaaggcctgtatgcatgtggcacaacatctaacattgtaattgctcactcagtagctctgagcacttactcttcaataaattcttagatgccgtggggatggcgaatgaactttttaattacatgtctgttgttttctatcaccaggaactaaattaatgggaaattagttcacaaggtttattatgcattttccctctttaagaggggactctttctgacagcccttccacttttatccttttaccatttttttttattggcctcagtactgaaattccttctttcttgttccaactacatcagaaacattcaatagacttagcagcctatgaaagtctgacaattacttcctcacggcagccttgtttcaagagtaggtccagaataaataaaagtttttcattttcctggtggcatctgttagttttcaacattgcccagagaaagagttactgtggaatacaaaaaaatgagctatttttttcttccttttggggagaaacagacatatagaaaaccatgagtgcttccttcataaatcatattttatgtgcaaccagtaagagagagagatgatgatggttgtggaaaagtcatagtggataacctcaatttattcagtcttctgagataatgtaagagtaaagcatggaaacaggaatacagagttcatcataattatagatcatccattcaaaacattttgaaaacagtgctatgtaaacttgggatgacaaataatgaagcatagttaacacttctcattggttgtgaattttcaaatacatccaagtatttaatcatggccattcatcattctgtaaatcaaaactaggtctttgaattctctccctttcctattctcagattaaggcatatttggtttcatataaaatcttatgcataattttgaatttcttgggccaatcaaataatggtacataatttaatttaaaaaacttttcagaaggagaaaactcatgtttcacatacttcttattaatcctaaggcctagcaaagggtacatacagctgtagttcacctcaattatacactgtaaatatttagattagagacacgaaataagttttgggagttgcaagaatagaatcagatgtaggaggtattcttgtagaatagagatggagatgggatttaaaattttttatttcactgctagagcaataaaatcagtattaaaaacaaggagaggctgggcacgatggctcatgcctgtaattgtagcactttgggaggctgatgtgggtggatcacgaggtcaggagttcgagaccagcctaaccaacatggtgaaaccccgtctctactaaaaatacaaaaattagccgggcgtggtggcgtgcgcctataatcccagcaacttgtgaggctgaggcaggagaatcgcttgaacctgggaggcggagattgcagtgagctgagatcagaccactgcactccagtctgggtgacacagcgagactccgtctgaaaaacaaaacaaaacaaaacaaaacaaggaggggcatgggcttggattttcataggaagagaggctgagaagaacaagaatgctgacatttgttttgtgaaatgggtctgaatgcctataaaagactagcaggtactcagacatgcctgtcaccacttggcagcaaagcaaggaaataggacagtattacatttgtgaagttgttgatcagaaaactagtgtgcagaggaatttgtgtgttttaaaatattcccaaagtggcagaatattactgacatttgaaacaatagcacagtctacctatgttaaaatggtatttccatttttaaattatattttttcaataaaagtcttgctctcttcttaagttacagatttttactttttcattttgcttgttcctgtgctccttgatccatcaatgaaaatgtgattttctgttggagtcttcgataaatatgtaaggctattttcattgcatcagaaagctgaaagggaccttggctgatcatttgtgtaattgaatcgtgtctgcgtttagggcacaattttcattttatgaaagaaacacaagatttcccatgatgttttgcatgtctacaaattcaggcgaatgagtctttcctcgggctcagtgagatcagtggggtcatgctagtgaattaactggcatgatatttgcttaacaaaagcatgccataaataagagacttaatagtcagttggcaagttgcttcatgctaatgctgtttttaaaatttaaagtaatggatgaaataaagttttatatacatgtctggatttttgaaaaataagaagatttgaggcatagtgtattatagcagaaatgtcttttaatttatttttagttgttttgggtacatggtaggtgtatatagccaaaaaccacaattacttttgcatcaacctaatatttacagggtacatgagatgtgttaatacaggcatgcaatgcattataatcacatcatggagaatgaggtctccatcccttcaaacatttttgctttgtattacaaacaattcaattatacatttttagttttttaaaaatacaattaaattattattgactatagtcacccagttgtgttatcaaatagtaggtcttatttgttctttatagctatttttttgtacccattgatcatccccaccttcccccaccccaaccctcccactatccttcccagcctctggtaactgtccttctatttccatgtcttttaaagtgtctccctcatttctgtgtacatgtgactcactggggaataaacagggaaatcctttgtgatgaatcagatgtcattctgagacacagagcttcttatacttttctttaaaatcatatttgcccttctagatcagtatcaagcaaataacaaccaagaatcaacatgcataaaaatgacaaggttatcccagagttctagttgtcattttcatagttgccagcacccttttccaggaaaacaaagagagtggccatctaagtgatgccgttgaggaagctgcctttcccctaatttctggagagcctagtgtagagggagaactcctgcctctgggaatatagcttttagggcatccctttatccattctccaccattccttcagtgaaggaaattataaaagcaaaactgggacccaaggcatgctttgagtctctttgcctcagcccgggcaactgtattctccgaattgagttcattaatattgtcttcttaggagaaatattatctttctccagactgggcagggagtctggcttgagaggcaacaataaagaaagaatatgtcttcctctataaagaaaggccactttataatgaatttcctttagatcacgaacagcactgtaagacccagactgtcaacttgtgcttttgaggttaggagctgagaaaactcttcttgattaataattgagacctaaacatggcaaaaaacaggtctgcctcagcacggagatcatgcatcgaggtggcgggcgatgccttcagtgggttctcttttcttcctgtctcctctgcgattatgtggcaagtttagagtcaactacaggaggagtttcagacaagaagcacagtttgatagaaactaatttctggattgtgattgtgtgagacctcctgggtgttcctgagactttcggaggatgattcttggccttgctttgtttttgttcttttcttctttaggttttcatctgaaggcaagtaactcatgtccctacaaggaaattcccctgaggaattagagataagcatgcatttctcaataaaacattttcagaaaaaaagttgctgtgtttccgggagaagcagatggctgctattgagagacacctaggtttgtgttctgggaatctgtctcctactcatgatagcagggggcagattcagatctgcaggaggtagaaataggcatcagatcactctgtcctaaaaaacaaacaaacaaacaaacaaacaaacaaacaaacaattggaagaaatgaattgatcacagaagcatctagagctaggaccaattaaaagtcagttagtttatatgacctatttgaagatttctcaacaatcttgacctattgcttaagagcacaacatttgtagtaaaatgagcctaagttaggatatgacttaagatcactgaccagctgtctaagcttgttagggttacccaatattgtgaaacttcagtttccccatttaaaaatatggaggcaataatagcaattacctaactggttattgcaagcattaaaggaggtcatcaatttctgtttgaggttggaaaatccttcaaaagctttctattcatttgagtaacaagcaaaacattctgatttaatatctgtatgtgcttcagtgtctttgattatcacatttagaatattcaatattttacttgtaatagtgaataaaaagtttgctggttgagagagtgaataaatgggtgaatggaagagtaaataatgactcttgtaacactattagttatggagtggatacacactagaccagtggggctgagaaaatttaaaaaatattcaagcagtagaaatttttacttaataaatattgcttgggaggctgaattaatgataaaaataaatgttttgcatttgacattatctacccaataattcacttctctctgcattctctcactctcttaaagaagggtaccacattgatgatgctaaatgattcttgtagaaccagccagaggtggaaaagaaagtagttctgacacttggttaaaaaatatacatatacataaataaagtcaaactccactgccatctctactcaaagtgtgtgcatactttcttaagtacacgctgagatgactcattttacacttctttttttacatatttaccctgttttaatgggttggggaatggcaagagcaaaggaaagaatagctgattaccattcaagacacacatccaaatcacataaagaaatctttagatctgagaataattgtgaaaagaataccaaattccagtgtagctttaaaaagtgcaccgttatctttaattacctgcttgatagaagaatatttattttggaataagaaggaataatttcaaagttgatggccttgttataaatataagcaaattaacttttttagaaagccatttcgaactccgaagacaccagcaacatttttattgattaattctttagtgttataacaagcaagttgtttttatgccgtatttatgagctggtatataatcacacatctcaggggtggagaggaccttaagaatcatccacttcaacagcttatttgaaatgtgtttgtttttatgttctgtatatattctgttcttttggttatctctctctctctgtctctgtgtctctctctccatgtatgtatgtgtgtgtgtgtgtatgaaatagataatatatataaattatcataaaagtatatttacatatatattttaatgcccactctattggacttgtaagaaaatcttacttctataaagtactctagaggcatatacttgtagcttattttgtgacatatgtttggtcatacatctaataacaaatctttgatcaggagcataattccaattagagcagtggttcttgacagcggcagtgttccatcctaggtattttatacatgtatcagaattttattttatcatctcaatgactagtaaaaggcaaggttgctgggtgccctgtgatgcatgtgacaatctttctcaaaaggaatcctcctgcttctcctaaaatatttgaatgacccactggattttgatgtaggttagagactgtttataatcatcggagcctagattttattttacttaaatcgcagagtactgtttttgctattttaatatgctgtaagttttcccagaaaacaacttgtataaattgacaaaacttattttgttcagaatttttccaggagatgctcaatatttcagaaaacgacctatctaaagacaatagtgtttgtggcatttaagatagaaataaagtacaaaccgtcagtctgcatgcaaactgtagttactgtattctcacgattctaattatgggtgcaggcacccaggactttgctatgttttcaaatatagtttttttctattgctatatatggaaattcttataattttattctgaattaataaccttacatcttttttatgatatacttgggacattatattgatttttaaattttgtatacagataggttgtattatctataaatttcaaatcatagatgatgtaacttattatgtctatgataatgaaagaggcattaaattatgtacgagtgcaataaggagttgcgtttgatagggccaaaaagccctgaaataaaaaagcagtatactcaggggaatttgctacatcttctagtacaagtagaattatggggcaatatactatttatcgattgttatatagtaatatcgccacaaactgagtggcacacatttatcatcttagagtttctgtggttcaggagtctgagtatggtttagctgcaacatctgcaaggctacaatcaagatggtggccagagctgcagtctaatttgtaagattggctgggaaaggatctatttcatgagtcatgcagttcatgtaggaatcgaggtccttgaggcctgttggactacagacctcaacttgttgctgtctgctggataaaggcttcgcttacttcctcaccgtgcagctctcttcagtatggccacttacttcattgaagccacaaagggagaaagtctgaaatcaagacagaacatataatcttatgtaatgtcatcatgaaagtggcatcctgttggcggagcttgcagtgagccgagatcgcgctactgcactccagcctgggcgacagagcaagactccatctcaagaaaaaaaaaacaaacaaacaaaaaaaggaagtggcatcccattatctttgctgtattccattggtgacaagtaaggtatagattccacatgtactcaaggggcacgcattacacaagggatgaccactcacctgcaaggataattgaggaacattttcgattctgttcaacacagccaatttcctatagcagtgttaggtggaggggatgagttattgggatcagaaggtagctagtgtgttctgtagtctttattccaatgaaagataactttacccattaatgtgaagtcaattgtactcagagaagagggaaaactagattactagaatgtaatctgtttaagtcttgtaagactacaaagtccttactaatttgatgtgcatttctctgatgagcatttctgtagcactggagtccagtgatgcagggatgggttatccacattttctgccactcaagatctttccatccaggtgatccagctagttctcaggcccatcaaactttgatccagggtcagatctggaagaggtagagagcatttttttaattccttatttaaaaaatgtgatttttgtgggtcatgtgaaggtttgttataaagataaacacgtcatgggggtttgttgtacatattattacatcattgaggtattaagctcagtacctggtagttatcttttctgctccgcttccctcctcctaccctccaccctcaagtagacctgagtgtctgttgtttccttctttgtgttcctaagttcttatcatttacttccctcttataagtaagaacatgcagtatttggttttctgtttctgcattagtttgctaaggatgatggcctccagctccatccatattcccacaaaatatatgattgtgttcttttttatggatgcatactattccatggtgtatatgtaccacatgttctttatccagtctattattgatgggcatttaggttgattccatatctttgctattgtgaacaatgctgcaatgaacattggcatgtatgtgtcttttccggtgaggttgcagagaaaagagaacccttacacactattggtgggagtgtaaattagttcaaccattgtgggaagcagtatggcgattcctcaaagggctaaaagcagaactaccgtttgacccagcaatcccattactgagagcatttaagagtcaaatgtattcatgacataaatgtgtattgaaaatctgatatgttttagtgattgttttatagggagggggcagagactctgcttttatgaagcttacagtgagtgccagccaccattttagcttttgggggccttctctaagaagggtggagtagttaatgtagacaaacatgggttttggcagcatacgaccatgaattaacattatatttccgcttaccagccgtgtgattttagcttacgaaagctactctctggttgtttatttcttcaagtgaagaaatgggtctaatagtacctatcacacaagattttctgtgaagattttgtgagatcctatatattaagcacccagtgcataggtgttctcaatgttaaatcccctctccatgtctgaaccttcaataaaacagactattacaaattacatatgaagactttgatgtttaacgtcatccacacaaagttaggcaaaagtcatatataacaaatatttaagtaatcacctggaacaagatctctttagttattttttaaatatgagatctcacaattattctcagcatttcctgttcattgttttgctatgggtagcatgtcctgattactcagttatacaaaatatttgaatggcttaaaggagtatttgtgtttgacagcataaataatattgtttttgaaaatgtatgaatacagatagaaatcaatggactggagtatatgcatttgtctatcttggattgatctagtgtattgagtcacaaaatttagttgatagaagggatagagtatgagaaacagagtcccacaactttgcatcaacttagaaaattattcttttatttaacattcattcattcattcatttattcaacatttttaagtttccgttccaggatcttgagtacagacatatgtggttttattgcactttgctttatcatgctttgcagatattgtgttttttacaaattgaagatttttgacaatcctatgtcaagcaagtctattggtgccattgttccaacagaatgtgctcactttttgtcacattttggtaattctgaaatatttcaaaagttattattaatctgttatggtgatctgtggtctttgatgttaatattgtaattgtttgggagcacaacaaaccatgcccatgtaggttgcaaacttagttggtaaatgttgtgtgtaatagttgctacaccaaccagctgttccccaatcactctccctctccttaggcctccctattccttgagacaaaataatactgaaattaggcaaattcacaaccctataatggcttctaactgttcaagtgtaaggaagagtcacacatctttcactttaaaccaaaacctagaaaggattgagcttaataaagaaggcatgtcaaaagctgagataggccaatagctaggcctcttgttccagttagccaagttgtgaatgcaaaggaaaagtccttgaagaaaactagaactactttagcgaatacacaaatgataagatagtgtgacattctaattgctgatatggagaaagttttagtagtctggataggagatcagccacaacattctcttaagccaaagctaactctcttcaattctatgaaagcttagaggtgaggaagctgcagaagaaaagttggaacctggcagaggttggttcatgaggtttaaggaaagaagccatcctcatagcataaaagtgcaaggtggtgcagcaaatactgatgtagaagctgcagcaagttatccagaagatctagctaagattattgatgaaggtggctacactaaacaagagattttcagtgttgacaaaagggttttcttttggaagaagatgccatcttggctttgaatagctggagagaataaggaaatgactgacttcaagggacaggctatcttgttaggggctaatgcagcaggtgaccttaagtcgaagcccatgctcatttaccattctgaaaatcttagggcccttaagaattatattaaatctatcctgcctgtgctttataaatagaacaactaagcctggatgccagcacatctgtttatagcatgatttactgaagattttaagtccactgttgagacttactgctcaaaaactaaaaaaaaaaaaaaaaaaaaaaaaaatactcttttaaaaatattactgctcattgacaatacacctggtcactcaagagctctgatggagatgtacaagaaggtgaacgttgttttcatgcctactaacacaacatccattctgtagctcctggaccaaggagcaatttcaacgtctaagtcttgttattgaagaaacacattttttaaggtgatagctgccatagatagtgattcctctggtgtatgtggacaaagttcattgaaaagcttctggagaggattcatcattgtagatgccgttaagaacactcatgattcaagggaggaggtcaaaatattaacatttacaggagttttgaagaagttgattccggtcctcacagatgactttgaggagttcaagacttcagtggagaaagtatttgcaggtgtgatggaaatagcaagaaaattagaattagatgtgatgcctgtggatgtgactggattgttgcaatctcatgctaaaacttgaatgattgaggaattgtttcttacagatgagcaaaataagttttcttgagatggaatctgctcctgatgaagatcctgtgaacattattgaaatgacaacaaaggatttagaacattacataaactgggtagataaagcagcaacagggtttgaaaggattgcctccaatttctcaagaaattttattgtgggtagcatgctatcaaagagcattatatgccacagagaaatattttataaaaggaagagttaaagcagcaaatttcattgttgtctttaaaaaaacaattagcacagccatctcagacttcagcaaccaccatcctgatcagtcagcagccatcaacatcaagggaagaccctccaccagcaaaaagattatgactttctgaagattcagatgatcattagcatttttagcaataatgtatttacaaattaaggtatgtacatttttcagatatgttattgcacacttaatagactacagtatagtacaacttttgtatgcactgggaaaccaaaaaattcaggtgacttgctttattatgatgttcactttattattcagttcactagaactgaacctgtaatatccctaaggtatgcctatgcttgaaaaatgttatcagtaagatgtgtaatgtgtgacaaatccagataatacattacttttggagaagctgagctgtttcaaaagtgttccttttatttgaagaagaagcagagtagcccaatcaagtaattttatttattttgaacttacacaataatttacgcttttgtttttcagcaagtagtaagggaggtgggttaatctgaaatgaaatgttcttagatcctgctgttcagttggttggagggcattaaagatagttattacttaagatctctgttgttttgaaattcccattttcctctgacctaaattctatgatgtaaaagaatcccagccaccacagatagactgtttttccttatttaaatgctttaaaatttagttttgacggaatggtctcttaatagaattcttgtgattctgtaacatcttagcatctttggttggcacttagaatattctcccacaggcatatttcatttgcctgtatgcttgtattcctcattagcttatttcctctggagagtgagactctgtttctgcatgtaacagttgatcagtaaatgttttgattattactatttagatcctgaacatgaacgggctcctattcctttcctattgctgcccccaatgaatttttacattcaaaaagtaatgacgtgttatcttggtttttgtttctgggaaatattaggaatgctttttggcaaatttcaagggaatcctatttggcattagaaattatttattttgaggcctcgtgtaaaataagcttcaggattttgaataactttgggccctggagagagtaatacctaatgaaaactgcaactcaaagaaataatgaaaggcctctttaggaatcaaggtggtagctctagctcttgaagtcttctaatcaaagagtcaacaaccatttttgatctctgatcgccaaagcaggcctcagaggggtcaactggccatgcagcctgatctcagagtaatggctcctcctatttcaagattcaactcaagcatcaattcctgtaagaaaccttgacagaactgccttttctcccacctccaagtcaatgtgaccactccctttttgccttcactttctctcctgacttgcatttgatcagctaaatttatgtaaaaaaatgaagcctacaaccctaagctgatctgaaacacacagcaaatggaggtagccacatatatatttgataatttcccagtttatagcataacagttaaatcattgtaatttcttatggaatgtatggatcaaacattacatttattctgtattgtgtgcatttggagtaatccatttgacatttttttttacattgtgctagaaaagttaatgaggccactgaagagaaccaaaagtaggaattagaactgaagatacagcaagaattgctaaaagaaaggaaatactgtataaaagagaaaaaagacttttatggagtgattttagagtaactatggctttgtaaaaatgcacatcagtttatcagttttataagccaatgcttggtgggtatggagtttttcagtgatccagtttcaagtaaataagcaacgaataagaagaaattgtgtttctttctagaatgtgttgtcaaccactgaatttaatgctaccaatagatgcagactcatgaagtgcagtatgatttcgataaggcctaagcaattatcaaatcagaaatggatctctcatgctataaaattgtacatttaagcaaataattttaagataattggctttcaaactatttttggatgtatcagaagggatggttgtggaaataacagcacagtaaatgaatagttactggaggacaggaaagcagaaaaaaaatctgaagtgtaaggagatacagtcaagctgtttataaaatacatttagatacaaaagaggtcactgtgtggaaaacctttagaatcactgttgaaagaaaaaaaaatgtccacttcccaatttcaagttctattgggattgtttgtattataaagagttgactaataaattcctgccaaggattatttccctatccaaacaaaatgtccacaattctttatgagagaagatgatacccatagcttctgcttcccgcagtggcactctcatcacatatattggtaagtatagaggtgccaaggagaagcaggcaacagttttctccatagcatccatagtcatgctgttcagcagataagcctagtacagttagtatgtcctgattttttgctaaatcctgggaaaaatgaaaagagtcttccttatgcagttgtgttttgctgctgagttgtgtttgcagtgtattagaagaaatacatgtaggaagcctgttttcagtacaccactgtattactccatggtcttgaatttctgaggtcttaaaatagggttattaatattacggagaaagtcacactgctgggtaatctggttgaaatggagacagagcataaaccaatagaggtgtacacatatactaagaattttgactggttaagggaaacaagaaacaaatgtatttgttttcattagtaaatatgattttttctcaggatatgagtaagaattagtgaagagggaacaatattaaattattttccttagtaaggtaggatattaaaaattaatcccttctatttgtcagttttccatgtccagagttaattgaacagttgtgttaacattaatataacattgcttgctggctaccaacaataatagcatggaagaatgttttaaggtatgtcttctggtagaataactatatcctcattattaacagtgtggaaaatgtagaaatgtagaaggaagcaaataatcactcatccagagatgatccatgttaatgttttagtgtatttttttctatatttgtagctttgccaatttcacacagttactttttaatatatacaccggggttaagtctttgtatgattacaaaataaattcttgttcaatttttgagaaaaataaggaaactatgaaaacagtataaagaagagcatgtgtgattcctagaaaacagcaaaaataatttggaactgcttttaatgacaagggtaggcaatcaagtttgctaaaatgaataggataatcagctccagccataaataaattagtatctttttaatgtgtctgttgtgtgtattctgcagctggctcttaagtaatttttaaaggaggcctgatatgtgttcggagggggagcaacatgattagaatatggtagctagcttggaataggcatcatcaatgattcgaatgcatgctctagatcatgcatgctttggaagctacaaagcttctccaaatcttggagaagcaacacagtgagaaacctgtcactaagcttttgaggattcctatctggaagaggactgttaacagtaaactcaggctgcagttgattttctttccatcatcaacatattatctgggtctagtgaattacaaaccctcctcttggcttaacattctctctgatggctttctgcacattggcttcctcttcttgctatcacggtaattactcaggagacataccataggttttcttgggtttagatcagcttaggaaagaaaagaaaacttaatcagtgaacagatttctttggcattttccatgtaatcctgggacccctgcttgttagttttgtcctgtttcctgttacagaaaaggctgaaaatcagcatgcagatgaatgagatagcagatggttttcccgtgatagagaccaacaatttgtgagatagaatagtaacgacaaacatacataagagaaaaggcagaattagagtacagtattttaaaagctttcaggcgctcaataaatgctcactattgttaaagagagagaaaaaaggaagtcctgtataatacatcaataagattttaattttcagttattattatttgagctttatttcccagctctctgacacagatttaggggtggtgtggatattcttagagtggaaattattgaactcttagattaaaggtactcgagttcctagcttgccctgtaactacacatatagagaagatcactctcgtaggtgctagtaagtaggagataaaagttttagggggaaacacagagggatactcagaactgggagcagtcctaaggtggaccttcaaaatgattcatgtcttagaaaatatgatttaagagaagttaggtctatagggtcattttatctgaggaaagatggctgtaaggatctttaatgataggagtcaaatatatgagagattgttgcaaggagaatgttaaccagctattctacaactcgactggggatagaaatagctttaaattacaatatacagaatttagattagataaaggaagtatgctctgaaagtaagagttgttaaaagttagaatatgttttccaagtaggttacaaaattgttttaataaaattatttgtgtttattcaaaaataatgaaaacatatatattacatatataaatattgatatattacatatcaatatataaacctaggatataaacccaatatgtaattgatatgttacatatcaatatatattatacatgtattgatgtcttacatatcaatattatacatgtgttgatatattacatatcaatatattatacatgtgtttattatatgtgtgtgtgtctatgtacaaaaagatagctttttgacctcaacagcattataacttgataattgtcttattttggaactcacgctgaagtagctttcagatactgttctagaaggcttaaattaagtatgttgacaataccccaaactactggatgatatttgtaatgaatttcaccctatatcagtacagaagggtgtcacagttcagcaaaacaaaagagaatacgctttgttaaacctctactttctgaattttaggacagtgaggaaatttaacattttcaatttttttttcttttcttgactgaaaagaaagtcaagccagcaatatgtttctgagagagcagtgatgcatttcacaacactgttaactgtctgcttggctttttgaggcttccagagttcagaattgtcttctcttgaataggtcagtgcatttttttccttcagtttttctccttaagcagcaaaacagaccatttaacttccaaatatttacagcttgcaaacagataaacttcccaaatctgtttttttttatgaaaaggaaaacgatcagccacaataatctataatacgatatatttgaatcaaagttattagatgccctagggtcttttcatggcagattttatatatcaccaccattaataaatctgttatcagaattatgtctttctctctgttgatagttatttttagactaacatattcatacctccttctgatgaaaaacattaaaatttgaataaggcatattagaaaaccctaaagctctgtatttacacaaaggagactcataaatattggtttttcagggtgaagcattgtgtgttattccattttgtaccacagggaaagcctagtcacacatggggcctcattaaaagaggatctaaagaaatatttaatggttgaaatataaggtcttattctgaatatctaccttcactttataataatagaaactgaactgaaaagattcagtaagtgatttagaacatccactcattttaaaagtaatgtctaggcctaggaaagtgacatcatgttccaaatgttacaaatccagcgtttttccttgatgtctttataaatacattgtttacagtttttattctcctccatatatgatgccccttttctaagattatttcgtaggtatatcctttaatgagagaacctcataaataaacttcctgaatttgaaaacgagtgagaggagacttcaagtttgtggactgagctaaacatgtgtctactctcccttcaaacatcccatggaaatggcagtaaagacagaacaaagagaatacatttctgaatatactgaggaacatatactccagagagcagaaacaggaagaggggcctctgctaaagctgaaggagtcttcaggagggaacccagctgggctctgtgttctggttggcagatacagagagtagccaaggtcaaaagcagacaaacagaaagtgaggtgattggccacaggtttggaaatggctcaggtttgctctttccaaccccttgcatgtcactgcacatttacctccagaagtaaagcaggagaactctgcaaagggaaccaacaatctgcatgggagggcattgcctccaagtgtgtgggctggcgaccaagtgcagccctctgccctagttatgggagttggagagggacttactggtttgcatgttccatgcaagagctaaagcaaagcacatctcggagaagtgagccaggaaagtggatcaatccatgccaacaacctatattaattaacctgataattaatatgtatataaagtgaaaaaaaagaaagaaaaaagggaaacagccatgagacaggatttcacaacctctgcactatcaacattttgggcaagatactcttttgttctggagaagtgttctgtacattgcaggatgttaagtagcatgcctggtctctatccaattgatgtcagaagcaagcaacatccatccctggccactgtgaacaaaaatgtctcaatatctagacaaagatattgcagcatactctggaggacaaaaccagcactagctaagaaccattatcctagagaaaatagaaatggtttagagaagagatcttttcaagatatctaccttggtatcctcagacatactgaagaattacagtctctaaaataattttctgatacggaaaatgaagaaatcaaaggacagaaataacccacggaattttaaagtttaattaacaaaattgttgaaaaattcaaggaaaccttccaaaaggaaaagaaagaagaagttataatatgtgaaaaaggggaagagacaaagagaatccgtttaggaagctaagtgtctgtctaataggaattctaaaaccagagggaaaaagcacaataaatgagacaaaataatcatgacatttcctagagttaaagaaaggcacgtcctcagaatgaaaggcccaaataatgttgagaacaatgaattttaaaatacctacatcagacacatgctaatgaaactttagaataccaagacttaagatcctaaagattttgaaaaagaaaaacataaacaaacattctatcataggaatgacaatcacagtcaagttttcaatctgcatcttgaaaatgccagatgataacaggacagtgacctaatgttcggacagaaaacaaacctaataccaaatggaatcaaacaggaaactcagaaatagacacgttaatatgctcaagtgatttttgacagaggtacaaaagtcattcaattgccttttccacaaatggtgctggatgcccaatggcagaaaaaagtaagtcttcacctaagtcttacaccttacacaaaagtcaactgaaaatggatcacagacttaaatataaaatatgtacctataaaaccttttagaaaaaaacaggagagtgtctttcagatctaaggtgagccaaataatgggtcgacttgatactgagatcacaacttataaatggaaatgttgataatttggactttgtaaaattaaaaacctttgccctgcaaaagaccctttaaaaggatggaaagacaagctacagattgggagaaaatgtttacaaaccaaatacttgatctaggactagtaactcaaaagtcaacagtaaaaaattttagtaacaatctattttagaaaatgaacaaaagacacaaagagatatttcaccaaagaggatatacatttggtgaaaaagcacatgaaaagatgttcaaggtcattaaccattaagaaaatgcaaattaaaactacaatgaggtatcactatccaactatcaaaatggctaaaataaaaagattagtgacgagaccaatcgctggcaaagatgcggagaaactggattactcattcattgctgctgggaatgtaaaatagtacagcccatactaggaaagagttcaatttcataaattaaacatacaactaccatatgacccagcaattgcattcctaggcttttctcatagagaagtgaaaacttgtgttcacatagaaacctgtacgctaatgttgaatgttcacagcaactttatttgtaatagctgcaaactggaaacatctccagtgtccactaatgggtgcatggttaaacacattgtgatacatccataccatggaatagtattcagcaataaaatagaacaggcatgcaatggaaagttacatgcaacagcctggatgaatttccagagaaatatgctgagtgagaaaggccaatctcaaaaaattacataatgtatgatctaatttttataccactttgaaaccataaaattaaatgaagaacagattagtggttgccaggggttaagtaaagtgggaggaaagtggttgtggctataaaagtgccacatgaggaatgcttgtaatgatggaattgtctgtttcttgactatgagtgtcaatatcctgaatgtgatattgtgagatgttaccatgggggcaactgggtaaagggcaaatggaatttgtcttatttcttacaactgcctatgaatttacactgatctctaatgaaaagtctcatttaaaaatttgatagtgcttgattttatcagttgatcaagctgctcttagttgaaataacaatttcagaaggatcagcataatgaatctaccagtcactgaaaactctcaattatctgtcttgtcttccctttcagtttttgtttcatttctgttttagtaacctcttagaaaaaggtagtattaaaggagacctaggtctcttttaccaatttaggataacttcacaatctccgcagataaattggtatctgtgtacacacacaaaaataggaaattcttgtgagtagtttacaggggaagtgcttaatatataaacaaggcagtgctctggtaaaattacttattgcattgagattaagaacataataaaattattaaaatagcctaccactttcattacagacttaaaatgttcttccttttatctctgggggtttgataatccctgtttattgttcttttattttgctgtatatcacgttggccatttaatcattggctctttagcagggtgggtgtagagagcattaaaaaataataaatgatgcagtttatcatcacctccctgtaaaacacaaggcacgtgaaggatatgagtttcctttaagctaacgtatttacttaatgtgatttcaaacaaactcctacaaaagtttttggttatggcatccattttggaatttgaaaaatatatataattcatctgaaataaatgtataaaacagctaattttctggtaagatataatatgtgggattatcactactacttttcaaaatgtagtctaaagaatattacttaaatgagctttatgctgagtaaagaatatgggggaaaaaaccctaagagtataaaagcccagaaagagcctcttctacgtatgagagtgtatgtatgatatactatattaatatatgtattgtttaatataacctattttgataaataatagtataatagactatattatatactattatataatatagggaggaaagtaccattaaataaaagatactggagcaactggataactatttgaaaaacaataaacttagaccatttgttgcactatacaccaaaataaatttcatatagattttaaggttaagtgggaacaaaaagatatcacacacaaaaaactgtatctgaaagtaaatatgttctccttatagtagagtgaaggaaatcagttaaagcattcaaataaagagaaaaatgtaaagagaaacattagtatatttgctatataaatggtaaacgttttatatgtcaaaaatcatttgtatattaaatatttatattaatctgtcatatgtggtagatgattaatatacctagcatataacatgctcatataaataataaaaaaatcataagagaaaacaagacaaaagccatatatgtagataattcatcaaatggaaaattataaataagcaaattttgaaggaaaataaaataatatgttctatgattaaagtggtcaatgtctttaaaggctaatattaatagctgacttgtggtctgtaaagaatagtttatttaacatgtgacttataaaaatatataacacttttggacagcatttttagagataaatattccacactttttgtagcattgattaactttattcacatcttaaatacttataaaaatctgaatactactttatttcaatgttatttaaattggtgtcaagttctggctaatctacctaccgaatagtaagaatattgttatgcagatcattgttattctataaaatgcagtaccattcagtcattcaaaaatacatttccaaaaaatgtttagagaaaatgctaaaattatgctaagtgaaaattcagacaatatttaaaattttaatagtctgacagattctgatatagataaacagaaagaaagaaaggtaatgtaattttcatgtaattgtacccatgtatatggggaaaaaaggcttgaaggcagtatacaacaaaatgttaaggacttgttatttgcatctactatttcaagaattccttctgaatataaccaacagtttatgcacaaagaatttaattgcaatattcttaataacggtgaaagtcaaatattcatcaataggtaagtgtttaaattacattatcaaatactcagatgatataattctatgcaggcattataattatgtctttgaagtgtttctgttttaataatatgtaaaagtgcttatgatataatgctaagtaattaaaccatatgaatgtatgttaaaaggctgcatgaaaatatggtaaattgtttgcataggttatcattgagtagtgaaatcataattgctatttctttcttttttctttttttttttttttgagatggagtctcgctctgtcgcccaggctggagtgcagtggtgcgatcttggctcactgcgagctccgcctcccgggttcacgccattctcctgcctcagcctcctgagtagctgggactacaggtgcccaccaccacgcccggctaattttttgtatttttagtagagacggagtttcactgtgttagccgggatggtctcgatctcctgacctcgtgatccgcctgcctaagcctgccaaagtgctgggattacaggcgtgagccaccgcacccggcccataattactatttctttcattatgttctggacactccaaattttcaactacagggtccagcctttgcaatcaggaaaaaaaaagtgtttaaaaacatctctgaggacttacatataacaccagaaggatttatacatttatttagttaatgtggttaataaaaccaaaatattctttaaaccatgtcttagcttcattcttgtctgcaatactttggcactgcctggatttggcatcatgaactgctgcaactaaaataacagtaaggtgcatttatacaaaggaagaaatgagagattaaggtcccctgttaatactaaggagcctgatagattttgatatgttttgtgcactggtatctgtattttcattttattgatttttttctaaggaccttacagctaaagccaggtccccaaagaagtcaggggtttttgtgttacccacaacttggcagaatgtctgcaattactccttctgcttttaactgactttgaatcctctccttttggcttgagtacctggctttcagccaggagaagggaaaatactctatctgttggttttcaaatgtcatttcccctttggctttgttgatggtaaaattctgcctttgcatctgaaattggaaactcttctaatcctggagtctgagtgtaattaatcggaaggctttctcttatctgtgtctaggatcagcctttagtctgatcttcatttttatccaggtgcaaaactcaaatacttttacctttagtgcagtggcccaaattttgtccctagttctgcctgtgctatcattaactgtcattttttaattatatctacacacgaatgtgggccagaggcagcaagatctggattttctcttcctctctgagtccctgacccttggattgttcttccttcttttcaattttggtgggttctgggtttagatttgtagcctaacctagtcaacaacttctttggcatagaaaagaattatttctgatgtgtatattttcccagaagttagaatacccctttgatatatttatttgtgtttaatccacagaaagaatgaagaattaagttatattaacaagagtatcttgcagtatatatatgctttaaagttcacagtgactttgacatgcctctttcatttagttttcacaactcttggaacgtgtttttgcccattttctgcataagaaaactgaatttcagtaaaattaaattgtttttcccaggcaacccagccaggaatcactagtccccctctctcaaaatccagcatttgctcactagaccagagctgctttaaatgacaatagtgtatggaattcattatagtagaatccattctaaacacattgttaatggtttgatcaaacatctttagtagcaccttttcattcatgttttattatgtatgtgtgctacccactttctgtgcagaaatttcaaggaaaaggaaattaggctttctgtaatactcctaatccctgtccttaataagtccaaactctttaacatgatacataagactttcactatccggggaccccagggtactgcaccattctcatccatgtttctcacctctaagcttgtgatactcctgtcatgcagcattttcctttgttgtccaaacgtgtcctgctttaaatgttaccattctcaattctcatctgcctggtgaccttgtgtttcagtggttgtctggagcgttagtgttcattagaataacctggagggtttgttaagacatagcttcttggacgcccacttccaggtttctgattcagttgatctgggccctgaagttgcctttctaacaagtttccatgtggtcctcttgctgctggtctggcatcacactttaagaagtattattctacttatccttcaagacctcaacctaattgatctacagatccttttccaactataggaatatttaattgcttgttactctatgctttcaagctcttgtttgtgtaacatctcacattttttggtgactatttatgagtgtcttctttgcttaactgtcttccttttacaagggaaaagacttgtttgacttgtgtttagatcctcatgggctaacatgatgggaactcatgaagaatttgtatgaataaataatgaacctggaaacctttgttcatttaaagttgcttgtacaggatgaatgttttgcttcattggtttccattattattgtcttcgttcccattcaaattctgtttctaggcaaactggaagaggaaaactatgtaaactgaaaatacaattctaagcctcccaaccatctgagtggaccccttctctcaaccaagggcattccaaagttaacctgaaaaactagttcaggccatgataggatgggggagtaggacatgcctcaatattccctcctcccttctggaactcaggcacagctgaccagtattaacattaaaatagattttaagactgacaaggcagactgtttatagcaataagataccacattccagcctgaatctagtatagtatcacctgacagatagcagaccctgaaagaaatcaaagtattttatctcaaattatggttttttgccatatcttggaatagtcctgcaaatctgtctctcatgaggaaaatccacattctgaagagaatccctttccttttccaggcctctttcctgatccagaagaaaatcaactctgataagaaacatttacaatctattctctctgaagcctgctacctggaggcttcttctgcataatgggaaccctggtttccacaaccccttatcttgacccagacattcccttctattcattctaggtctttagactataacttgactctttcatccaattagaaaatctttgaagctgtccgggcatagtggctcatgcctgtaatcccagcactttgggaggctgaggcgggcagatcacccgaggtcaggagttcgagacaagcctggccaacatgttgaaaccctatttctactaaaaatacaaaaaaaaaatgagctaggcgtggtggtgggtgcctgtaatctcagctactttgaaggctaaggcagaatcacttgaaccccggagacagaggttgcaatgagccgagatcgcaccattgcactccagcctgggtgacaagagtgaaattctatctcaaaaaaaaaaaaaaaaaagagagagaaggaaagaaaatcttagaagcccctcacaccttgccacttcaaattgtccccccttttcaaatcaaaccaatatacatcttacatatattgattgatgtcttatatctccctaaaatgtgtaaaaccaagttgtaacccaaccatgtaaggcacatgttcttaagatctcttgagggatgtgtctcaggctactggtcattcacatttggctcagtctaaatctcttcaaatattaagagtttgactctttgacaactaatacatatatattttaataaccactatgtgccaggaactgtgcttcatatatattattgtgtaattctcagagtaattcccatgacataactatagtacatctgttttaaagatagagaaactgaggctcaaaaagactaagtattttgtaaatattctaagactggaaataatatttgatttcaagattttcttattccaaaatgtgttctgatctgctgctctaccccatctctactaaaaatacaaaaattagctgggtgcagtggtgcacacctgtaatcccagctacttgggatactgaggtaggagaatcacttgaattcaggaggcagaggttgcagtgagctgagattgcaccactgccctccagcctgggtgacagagcaaaaatctgtctcaaaaataaataaatacgtaaatataaaattaaattaactcttgcttgtctcatgacaggtaaagatgatgggacagtggctgcctatcttcagataaaataaaggtaatctccacattaacattactagcagtggttcctgctctcttctttcttttttttctttgcatccagattcaattcctaaattactcccagtatgacagtgatttctactgtgtttctccttcactctctgcagatcattgaagaggtagctgcaaatgcctttcacttgcatggcttttccaaaatgtattcagattggctgaatttctgaatcaaatacaatttattttctctcttatcctagcagaagatttaagcaaagagatatgtaaaatatattaaaaaatttttaagtttccttttttttttttgaggcagggtcttgctctgtctcccaggctggactgcagtgatgtgaacatagctcactgcagcctcaacctcctgggctcaagtgatcctcctgccttggcctcccaaagtgctgggactacaggtgtgaatcactgtgcccagcttatttattctttctttttttttgtacccattaactatcctacctctctttgtcccaactgcccttttcagcctcttgtaaccatccttctattccctattctcatgagttcaatcattttgatgtttagatcaatatgggacttatatttttaagcattttgatttaattttcatccgttggccaagcttggtgttctgcatttgcaaattttgttagggtacagggtagtcatggctgcaatctggagaaaataatattcaagatagtgttccaggacttattattatcatttcttactggtccattggctgagttggaataccagctaatttattagatataccctatgcttccattgtgcaaacctcagcctatacttggctacattctcttgtaaacattttcaagctttttaaaaaaattccaaggttaaatttgagttgtagaaaagaaatatgaataatggccatcataattattccattataaaaacacatacacacactcaataaaatgtgttgttttaaaattattaccctaaggcaagtggtgaatagatccaataaaaataaaagaaatagaatgaataagaagataataagacgaatggaagactacattctttctactgactggtcatcggtttttctaaatcttggtcctttatctccaatgggtctttgaggacaagcacatcttatgtactttgtaaatatttgctgtttatgcacattttgagtatcattgtttagctttgcttttcagatgcatgaaacaagtaaatttgaggcagcaaatgagtaatttgtaaatctagacacaatgagaaggcaattaagaatgctgcttgatgaaaaagaataagagaataatgttgtaggtaagggacaaactaatttcactaatagtggctttatatacagtccagtatgtgaaaatacttaagtaattaacattaacattcacactgtcatcctaggtagtgataagatactggcgaccacacacaaaaatggaatagatatctgtgtctgtaaaactaaaaactcttcaagggagaaaaagctctagtgaaaaatggaattcaccaggaagtcactcaagagaatgcaagtattaaaagcactttattataagataaggatgtcccattcttaaaataatctcctagggaaggcttcaaggatagcattatactaagtagagaagttgtctgacaaataggtaagtataaaaatcagagaacctacagaaaacaaatcattctttgagttgcatgaactttaggaaagagtctttatcagccatgatcaaataaattggacaggtcatataacaagttagaagttgccaaaatttttttatagaagaaacagatgtcatcttcttttgtaaactacatcctgaacatatcccatcctgactgcttcgtggcgtatataaactcccactccacccccttttccccgtctcaagcaagctgacctaccaagctgtgtatttttaatcactttctatagcaatcaagaatttgccatcagagaaactgcttcactgcgtcttatctttccatgcctgttcttgctaaacagatttaagataagagcaactggcagtaagtgcccttcctgaaaacagaggtcacagatgtttctactgaagcccagtaaatggttttgggagacatttgaaatcttagtcatattcaaatcccaaatacaatttctcttttttttcccagaaatttcaaaggttttagaaatattttctactggaaaggtatctctcattcttactcaaaatttagacactaatgagtagatggcaagtcttgtttataagcattaatcatgaagatgaacatttataactgaaaaaagatgttcgaattttggggtttgtaaaagaactaggaatggagaacatttagagttcactatgtggtgatattcacaaaagcaaatgatgatataactatgtcacttggaaggagcttcaggcaggttctttctcttctacatgtaacatgtaagcctgttttggggtcattgctgaggaaaactacttcttaagacaattttacgactgcattgtttcaatagtacaccaaactatgttggaaagttatgacctagaatctgaaaaagaaaaaagtgatgaaggaataatgaaaggctgcatgacagaagtatttagtcttcattcctgtgtttgaagcagaaaaaaaggtattgagggctaaccagactctgccttttgctaaattgaagagtatcacatcaaaggccaaagatccattttaacaggtgccttaaaaagttgtactaaatgatctctgtgcccctttggatcatgaattgtctacataactgcacaacgaatgaacgtaagaaaaatgaattggctggtgaagcctgtctggtaaacaatccatgatcctgagggaattgtagttttgcaaaatattcagcaactactttagtttaaatattttatatgactcattgaagctccaggaagatactactttcttctcaatatcagttcctggttattgtcatcattcctttatcagagtttgtttccttgtcaaatgaactcttaatacatgtatctatcactgacaattttgtagaaaggtcattatctgttctgtttcccactccatgaaacggaacttattccattcaacttcgtgtaaagtcttttcaaatgacacaactgtaattaggaaagatgtcaataactatttacagatatttatgttgtattcagaactgtactagttagagtgtgtggtttaaaaatttaaaaaaaaagtgggtgagatggtgagacttaactaccctattacaccactactaggatggtaagaatttagtaagtaaaccagaaagttattagaaaaacaagtaggagcaaaataagctctgtggcattgaactaagaataaaatgtgaagagaaggggtgagctctattatctacttagggatgccttcagtagaaaatgggacttaaaaatgggcaaaacttaggagggtctttccaggaatgagaatgaacagatcctgggataagttaataaggttggatttattaatcacctgagattctcttttttgattattgggtcatcttgtacacatcaactctgattacaaagtaattagtaatcaataattatttctgcatgtgccactggataaccattcaatacgtaaaaatatttaggtgaaaactttgcttgccaaagtttcaaaagttaaatacttaccaggctattatcactatagaaaacaaaggatgagacgttactatgaaaaggatgggtacaaaagtcatttgaagaagaaacgtactaataaaaatatatttcttaagtactttagtctgcaagtggcataattatttgtgtgcaatatccagaaatacatgcttcttggtgggttttaacagacatatttttacaattaaaaagtatatgcctaatttatgttgtggcagattacatttttcaaagacagttacactgataaatcccaacccacatggccatgttataggtgatgttgacactcctccattgggaggtatggaccagttttagtgactcactttcgtccaatagaacgtaacaggaataatgctacagtccaggtcataaaagggagtagaacttctaccttgttctccctctcatgatgttagaccttggaacacagccacatattgtgagaaagcccaaactaccccatgtagagaaatcacatggaaaggcccacagagagaggaactggggatccagctgatatttagcatcaattgcaaaatgtgagtgaaggaggcttcagatgattctggcctagagccttcaacttttttttttttttttttgagatggaatctcactctgttgcccaggctgaagtgcagtggcgcaatctcggctcactgcaagctctgcctcccgggttcacgccattctcctgcctcagcctcccgagtagctgggactacaggcgtccactaccatgcctggctattttttttgtatttttagtagagacgggatttcattgtgttagccaggttggtcttgatctcctgacctcgtgatcctcctgcctcggcctcccaaagtgttgggattacagacgtgagccaccgcgcccggccgagccttcaacttgattcttccatgagaggccctaaacatcatggcaaagagtctaaccatctccattgtgctctgtctcagttcctgacccacagaatctactagcatagcacctctaagttattgagtaatttttagatagacaataacaagataatatgtcaatctggttttcatatctaaatttatactggctccagatattcacttaagattttatcttggccaggcatggtggatcacgcgtgtaatcccagcccttcgggaggccgaggtgggcagatcacttgaggtcaggagttcaagaccagcctgaccaacatagggaaaccccgtttctactaaaaatacaaaaattagccaggcgtggtgatgtgcgcctgtaatcccagctacttgggaggctgagggaggaggatcatttgaaccctgcagaggatgtggtgagttgagatcacaccactgcactccagcctgggtgacaagaatgaaactctgtctcaaaacaaaaaaaaatttctctctaatatacaaataatatcactttcaaaaatgtatctgctcttctaaaaactcagtttccaaatagtgggctagtcattttgccaaattttagaaaacagttttaaaaaatcacacgtagctccaaatgtggtgcactttccttggttttgttcagtgctcaatacattgatgttgctaaaggccatatcagtgccctccgaccatggaagtttggccataactagttcaagccctgaagaactgaccctgggagtcaatccatatgctgctttgtcccaccaagaagaatctctcttctaagattttgaactaagagattgagagttagagagtagctatcgctgaagctgtcaagatcatctagacttgtaccatctcatgccagtcagatgactgttattaaaaagtcaaaaaataacagatgctggtgaggctacagataaaagagcatacaaattcactgctgcttggaatgtaaattacctcagctactgtggaaagcagttagtcagtttctcaaagaacatttgacctggcaatcctattattaggtatatacccaaaggagtataaatcattctaccataaagacacacgcatgcatatgttcatcgcagcagtgttcacaatagcaaagacatggaatcaacctaaatgctcaccaacagtagactggataaaggaaatgcggtacatatacatcatcaaatactatgcagtcattaaaaagaacaagatcatgcccagtgcaggaacatgtaaggaactggaggccattattctaagcaaactaacactgaaacagaaaaccaaatgctgaatgttcccacttataagttggaggtaaacactgagtacacctggatacaagggaacagtagacactgaggcctactggagggtgggaggaaggtgaggatcaaaaaactacctatcaaatactatgcttatcaactgggtgatgaaataatctgtacaccaaacccccataacatggaatttacctatataacaaacctgcacatgtatccctgaacccaaaataaagtttttttaaaaaaaaataagatcatctagacttgggtaggtggccattgtggacatcatacaagcagaagaagctgatctatggagaagacccataggacagtagtattgagaaagcatagagtcccagagagagacaatccagtttccacagccttgactaatattattgctttataattctgtaaaatttcctctgaagccttccagtaagctccttttccacaaacaagcctgtttgactagcttcttaatattaaaaccaaataatttctcaggtggcaataagggggaagtggagtgcattggtcacacaaaagacaacaacatgaaaatcttaattgttttcagtgtcaaacacttgagtttctggagacaaaactccctcttctaagaaaatcaaactattatacatgataattgtcactttgttagttaagacacatttatacaacattttaagatttggagggtagatactttattaataggtggtatggttctgttcttaagttatgtttctgatttttagatagatcattccctgtttctgtttgtgggaaaaatggctgtctcagtaggctgcattataaactcagttggaaaaaactggtttatttgttgaatgagaacttcatttattttgtgtaaatgagcaccactttttattattcacaggttattgacaagcataatattaagttaagatgcttgacattaaaggattaacatgtacaaatttgaaaaacaacagccgcctagtagacactcagaatttctgttcattgatcaactaagcataatatctctgctctttagcaagtggtttaaaaaattgatggttattagtagtataaatcttggaaaatttgcagagaaaatataatttgtctattctaagtatgttaaatggtttaaatgatatgttaaatagtttaaatgatgaatagcgtgaacaatattagctatactgtattagccattagccttgtaacaaattactcccaaacttaccagcttaaaataacaagcatttattaactcagtttctatgggtcaggaatccaacaacagcttcatggaatgaccccaactcaaggtctcccatgtgactgtcatctagctgttggccaaagctgccattttaaagacatgaatgaaacaggattatccacttccaagctcactgtgtggctgttgtcaggaagctttagctccttaccacgtgggattctccatgtggctatttacgacatggcttccctcagagcatgtgacacaaatgatcagagaaagatctaggtgcatggcctcatctcagaaatgaaaatccttcagttttattgtatcaacacaggtacgatgtaggagggacaatacagtgtgtggaagctggagatggagatccttgggagctgagttggaggctgctaccatagctatatctcttgctagagttcccgattttgcagcctgccatcacctcacctaagactgaacagaatcactgcctagatttacaatatcccagtatattctttttcatgtgcactctcactttacatctcaattttcattccgagcagtacttttaagaaagaattatcttcccctttaatgtgaggaaaaactcccctgtgtataaaaacaaaataatcattcaccatctctttctagtgtgtgacatgcagtgagatttaacttcattgctttgttagaatattctgttctctgtggagggccgtgtttttaaaaaatcactcttcagtttctgctgcaaaaataaaataaaattctctgtgaagtttgtcaagtgaaatggacacaaacatggctcaaagtctagaggaaataaaatgaagccacaatctcagtctatgaaaaagagataagttaggataaaactacagcaaaaaatgtacaggaaaagaatgctgctctttaggagagaaatcagaaaagtcagaagataaaatacagagcaaaaagtttactgatcccaacagagaaacaagaaacctcagagcacttatatgcaaagtatttgcggtgttttggggcccactgactgtaagggaaaccaggtatacacagctttagggcacaatggagagaaagctcttgatatactctcctgagtctcataaacagcaacatcctccaacgtaaatgacagtgaaagaatatgatgaactcctgatgggttgatgccacaggaggatccagccttatttttcctcagctctttcctcaaggaaaagactgggaattgataatactaaattgacaagtccaaataagccttcaggcaaagcagatgatccttttttttttttttttttaagtatccaaaccagtctcagatttcttcagccagaaagcatgtttttgcaggctttttacaaatcctaagcaaagttatgtagttctcgagagttatagaaaaccaggtttgcatcttggctctgatacccctccctgtgatactttagaaggcttacctggcctctaaaaacctccatcttctcatatgtaaaacacaaaaaaccctgacacatagtatgtgctttgtaaactgtagctcttgttaatagtgaataggttttgtttgtttgtttttcccaaaagaatttgatgcttgtgttttgaggagttaaaattctcaatgtaatagaagactctataataaacttacgtcttcttagggtgatacgaaaattattaaactcaatccccctttagttgcaaacaatcaatactcaataatttttttgaattgatgaacctctgattgtgtgcaactatcttaattatgtctatattcttggtcttgtgatgaaaagtatccagaaaatgtctactattcatcactgtatgccttcttctttttagcacagagctttgtacatacgaagttctcaactaatgtctgttaatttaaattgaagaagctttagggagttactacaatttaggtctggaactcacatcccattttccttcttttgtcccacccctacccatttcagccatgcatatgtgtatttggagccctggatcttcaaaaaggcagcaaggagctaattaagccattaatgaattaactttattttttgaagtttataacttatttagacttagtgatctttctttgctcattaacacctctccctgtaggcagagagaaaaaagattaaaatgtgactctgtgaattcttaggcccatataaattcctaagtacaggggaaaagcatcgatttgtaagtcaacatgacattagtcagaagtgttggtttttctttatctgcaggatctgtttccaaacatatttgatacccaggacttgaaactacatcaattatttgaggaatcttgttagggctccatttgtatggagaggtaacactcactggtggcagtggtttgtgggtagaaggggccttcgggtatgtgcggcaaccttgtcaccagaagctgacaccaacaatacacactcacatttaaaaaatgccaaaattgtatccatcacctccaaaattttccttatgtgaaaggttttggcaaatccttgccagattttaaatgattcattctacatttgtatttcacagttataaagcagaactttgcacaacaagttaacttgccaaaatattatgtaaatattgccaaaatattatatcatcaaaatattgtataatatctgtgtattactttttgtattatatatttgtattacataatttgtgtatttatttgctgcttatttaatttataaacataacagaaatataagggaaaaaaagccagataaattttccagaatagatgagaaatggagaaatctgagtccttccttcaagttcattgattatgagttgagtaaccatgatatgctagtatcttttcaaatatataattttttgattatataaagataaggttgatcttcatctcagacaattttccagcctagtagaaacaataaacacagttggattgtaacccaaacttcaactgtaggtcatctcacctaagttagtggatatttggtataatgtttagtaaaaagctacactttgtggcccttcatcatagcaaatattggctttattggcctttaatatcccaaataagaattatcaagaaaataggctccattttcattattaagtatttcagagaaataaaacaataatactgccttaccattgtaggtcattttatagtttccaagggttttcaactatatctttttttaaaaatttgaactttataacatccctttacagagaagacattttacagaggaagacactgagcatcagggacattcagtgactgctggctggtaggcagcagaggtcttgaccagacccctggcttaatcttcagagttcttccatgctgatgcatggaagacttgcccaaggaagttgtctccatatgaaacagccttgaaaataagatgactttcagtctagtttgatcaacatttatgtaaacatgtaattaaaaattgtttgcttcaactcaacagtatgtctctgaatgggaactggttctttctcaggaatattcttggctgaatgtgtctgtgctgtgtcatatgcctcctctttacatatgactgtgggagggtgtggctgtttctataaacactgaaaacagacctgtggctaacaaaggattgtgggtggcagttgcttttagaaaccttggtgaaacttttcaaaagaatgtttcctatcaagcggtgcgttgtacatgtgggagaatccctgacagcacgttgctcttcctggagctccgtgagcatttattcccagtaatgtcctttggtgcttctttccttcatcccttaacgaacctaatccactctagccactcttcgtgatgtgaggtcaagagggtgaacatggcagatgtggcatttatgcgattacattctggtggaagaaaatgggccattaaaatgcaaaccaaaaatcaatgatctgattaattgcagattgtgataactgtaagaaagaaacagagtgccctgataaaaattaagtacgctgacttatttccatagggtttctgagaagatcttcactctggggaaacaatatttaagctgcgagctaaaggatgacgatgacacataggaaagaatgttccaggctacaagaccaatcagaacagaagccatgaggcgggaagaagctacatgtctctaacttctagtcagtatgaccagagtgtagattgagacagacatgcagcatagaatggaatgagatgaaaatggagacagaggcgggatctagaatatgctatatcttgagtcttctaaaatgtgtccagcgtctgttctcagtgcaacaataaactatcaaagagttttaagcagggctatgagtttatctgacatctgttttaagaggtcattctattttatatgagtggaagagacatgaaaaagaccagttagaaggctaccagaacagtccagcagagagatgatgttgggagcaaataaagaattccactgtggaaatgtcacatttgagatgcccaagagacatctcagtagaagatttcaagcatccattgtatataaaaggctagagctcaaaggagaagtctgggtcagagatagatatttcagagttttgaacatatatgtgatacgtaaacaggaatacagattaagaataggggataggatcaaaccttgagaaattcgaatttttaagataagatatggaataaaaagataaaactgtgaaggaaagtcagcaatgtgaagggaagagcaagagtgtggagttgtcaaagagaagaggatctcttgagaagaaaggagtgtttgatttgaatgctgctgagaagtcaatacaaagaaggcaggttttacaacaggaccagcctcataattagtgcatctttcaaggagtgtgaagtactttcttcactgatttctgacattccgatttgtcttactttacttcattgcaccaggaggaatttgaagatccatccaagttgtcagccatgaaaacaaaagtgcagcacgtgagccccagctgtgctcctacctccttggtttggtttccatgagtagttaagcttagaaaaattgtgaagaaacttgttgtgtgggagcgatttttcaaagacctacaaacagaagtaccacttgacccagcaatcctaaacttgtatatatacccaaaagaatatgaatcattctatcataaagacaaatgcatgtgtatgtttattgcagcactattcagaacagcaaagatgtggaatcaatctaaatgctcaccaaccgtagactggataaagaaaatgtggtacatatacactactgaatactgtgcagctgtaaaaaagaacaggatcatctccttggcaggaacatggatggagctggaggccattgaccttaccaaactattgcaggaacagaaaactaaatacctcatgttctcacttataagtgggagcgaaatgatgagaccacatgggcacatagaggggagcaacagactctgggtcttaccagatggaggagggagagaatcaagcaaaataactaatgggtactaggcttaatacattgggtgacaaaataatctgtacaatgaaaccccatgacatgagtttacctaaacaacaaacctgcacatgtacctctgaacttaaaaaagaaactttttctgtatcttaggatcatgagaaagaatcacgttcaaagagtaacaaaattgatattatatttagacagggaatgggattgcaagtgaagaatctgtggaatctcttgatttgtgaagatttcttttagagttcagtaatggatctgtgacatccaatttttctagttaaagagaaagagcattgaactaagaatcagagacttggtttgcagtcccggattcattggttattggttgcttaaacttgggcatgtcacttaaccattctgacccctaatttccttatctgaaaatggtaaaaatcatacctacctgatagacttgttgtgagtgttaaaatgatgtggcttaaaacctagaggaggcattcaattaatgataccttatttttattaatattagcatattgggagtaagcacagggccaaatgcaatcatgtatagaaaagcattccgctaactataaaacattgaataaaatgcgctgatgtgtttatgattgataactgttttttgtcagctttttaattttagctgcaccatcttactttttggtacagatctatttactatctaggagttgtgggggacttggtgggtagccagaaaagatgacagctagcagagcttaggcacaggagcagatgtaagtgcaggtggctggcagtgtggggaccctggaagcagctgctctcagggtaaaatccacgggaggactaggcagggtgagagagcatccccaggcaaagtagagtgacctgcctctgagagtttgggtgtagaatgcagcaggatgactcagaaaagtctgcagagctttagaaatgcttttttttttttttttttttttgatgtggtgtaaggttagaagactagaatgacgtttgtctattattcaggagatgttctttgtaggagaaagaaagggaaaaagaaaaagattccaaatattttagtgggcattatgtagttccgtctcttgctccttcccttaattccccctccagaggggaaacagatatctgtgaaactgaaaagcttgcatctttgtgagatctgctggagggaagctaccgtttaaacccagtctccattattttaaatggttttaagcctcacatgtagtgctatttatttttccttctaaaaaatatttctgggttatgcctccatatacaaaactcacctttgtgccattgtgctgttttgatgataggtaatttagctagatttagctaccatctattgagcacttaaaattaatctctgtaataaactctattcaggcatttcatcatttaatttaatacaaaccctgtagaaagtggatatcactcctcttttgctaattgggcactgaggtttaaagaggttaagttaatttctcagtttgctatagctagaatggaataggtccattatttcaatataggtttgccagactccaaagcatgtactggaactactgtggtataaaacaatatccactccttagaaagatcagcatattcatcttctatgtcctatttataagtgaaccggtgtgctcttccctctttattgagatttttttcaaagtaggaaaaagggaaggaaaaagcatttattgaccacatgccatatgccatatttctttacaaatattttcccatcattcttagaaataaaccccaaatgaatatttttgtccatgtctttcaaatgaggagattgcttagagaagttgaggagttcgtcaaaatccaccatgcttatttattttcttttcatcttacatttttacatatctagtgattgtcagatactgagttatccagggttaaacagaagttacagtctgtgttaccaagggcctcgtagattactggagaagacaaagatgcaaataggcaattataataaaaaatgctacacagacagacaggaatatattcaagtcactcttaggcgcttctcctcccaaaacttaatcccccacttccattacgccatggtgccttccagaattagcgcagtttgcatactgaaggaaactgaggggtggtcagaaacccagtttgtgcaggaaaaaaaattgtggagatcaaaattagcttcagtttttaatatcagccattaattctgaggaacaacttcatccacttaacttgattttccatcttccttgagtcccaaggcaaaactgaaatggaaaagaatctacaggatgctttcatttagcaaagaggcaaacaaacccaaatcgagcagtacatcatagcaacccactaattggaagtctgggtaaaacatctctcatcccatttctaagaacttagctatttatccaaagcaagacctcttgccccctggagctctattccccaaagagaagacttctttaaagagatcgtccttcttagaaaaggagatttttctttcccattcagatatttctagattggttcacgtggatagagaattctatgccttttttagccactgtgactcagatataattcattttgccttaaaacgcaaagcatcagtaaacattgttagcattgttatgtcacccttttttttttttggttgttcacaaattttctttgttaaaatcctgtgcagctttttgaattcacactaaagaactttaaatttccaaatgaagaaatttcctggccagtttttggttttttttttttgaagatgactgctgcctgagtgtcaacatttgagaaaatatagaatttaatttttggaagtcactagatatagcaacctgcctggtgccagagaagagctgtctatgctgtactgcaatttgacttttaatccatcgtagatctgctaatggtatggcacatgtgaagtggtaaattcttgagtgtttgagacaaacattttaaggtacccatacataatgttaagttcacgtttaggaaagtagtaccagttaataagattacttatttgaaaataagaccagtttatttcaatctggatattcgaattatcaaataatctttttttttcaggattttcttggtgtatgttacctttttagtgaaggaccagtgtctcagagctttattttttatggtagtttaattatttaactgaaacctggaagaattaatagggtcagaattttagatcatgaaacatattttattgctcagtggatgatattcttcttggtattatttgctcttccccagagtcaccatatggtataaattattttaaattcccacaattatcagttatgtatatactaataatatcaaaatcatttgtttgggacattttttgtaatttattgaattttcaaagtcaattttgttcagaccattttttttttacaaagtagcttaaaggcacttagaaactgacagtattggatatttcatacgattttttagaattgcagtatctgccatttatctgaggactggtgattcaaaaactctgtttttggttaattttaattaaaaacatgtccactcaaaatactgctcaatacccaaatcattgcctaccttgtatatagttatttttcctaagggcaaaatagctaagaccataaattacgatggcaggcacatggtttgctgacagaactatataaaatactgttttcatcctcatgtcagctctggtacatgcctctttactttaattccttggggaatctgttgtaagttatagttttaaaaaacatccctaccccactagctctgtcagcttacctttttctgactgaccattttatttctctgaaagaacagatagaaactgagttatgtcttagctgaacttgtagtgccctaaatattaatagctgtgaaccagtttagtttaatttggatatttcccaatcttacacctgcgatattgcaaggtagttataaaaagtacacagaattcatctctataaatatatgctcattttatatcctttacaatctgtttcctagattcctaatccaaagaggccattagtaccaatgacatgatggatagagtaggttataatgtttagcagctcattggagatgacatagtttgccaagttaatttacacattttcatactacatatattatgtacaatattttttgtatggtgggttttcatcgagtacccttctctcttgtaagaaattattttttaagaaacatgttaaagagtaaagatgttttaaataagcatttctcaaatggttggtccttactaccaagcatattctggaactgacactttagttttacttacttccagcacatttcatgggaaatggagatgtccaaggaaacaggaagacgttaattgatgatacattttcttctaatattttgatatcccccaaagaaaaaaatagtccaggagatagattatactagaacagtttggctacattatctaaaagtatgttcccatggaaaattatataataggcttagtacattttagaccatttttttcattttctttttttttattattatactttaagttttagggtatatgtgcacaatgtgcaggttagttacgtatgtatacatgtgacatgctggtgcgctgcacccactaactcgtcatctagcattaggtatatctcccaatgctatccctccccctaccccacaacagtccccagagtgtgatgttccccttcctgtgtccctgtgttctcattgttcaattcccacctatgagtgagaatatgcggtgtttggttttttgttcttgcaatagtttactgagaatgatgatttccaatttcatccacgtccctataaaggacatgaactcatccttttttatggctgcatagtaatccatggtgtataggtgccacattttcttaatccagtctatcattgttggacatttgggttggttccaagtctttgctattgtgaatagtgctgcaataaacacatgtgtgcatgtgtctttatagcagcatgatttataatcctttgggtatatacccagtaatgggatggctgggtcaaatggtatttctagttctagatccctgaggaatcgccacactgacttccacaatggttgaactagtttacagtcccaccaacaatgtaaaagtgttcctatttcttcacatcctctccagcacctgttctttcctgactttttaatgattgccattgtaactggtgtgagatggtatctcattgtggttttgatttgcatttctctgatggccagtgatggcaagcattttttcatgtgttttttggctgcataaatgtcttcttttgagaagtgtctgttcatgtccttcgcccactttttgatgtggttgtttgtttttttcttgtaaatttatttgagttcattgtagattctggatattagccctttgtcagatgaataggttgcgaaaattttctcccattttgtaggttgcctgttcactctgacggtagtttcttttgctgtgcagaagctctttagtttaattagatcccatttgtcaattttggcttttgttgacattgcttttggtgttttagacatgaagttcttgcccatgcctatgtcctgaatggtaatgcctaggttttcttctacggtttttatggctttaggtctaacgtttaggtctttaatccatcttgaattgatttttgtataaggtgtaaggaagggatccagtttcagctttctccatatggctagccagttttcccagcaccatttattaaatagggaatcctttccccattgcttgtttttctcaggtttgtcaaagatcagatagttgtagatatgcggcgttatttctgagggctctgttctgttccattggtctatatctctgttttggtaccagtaccatgctgttttggttactgtagccttgtagtatagttggaagtcaggtaacgtgatgcctccagctttgttcttttggcttaggatggacttggcgatgcagactcttttttggttccatatgaactttaaagtagttttttccaattctgtgaagaaagtcattggtatcttgatggggatggcattgaatctataaattaccttgggcagtatggccattttcatgatattgactcttcctacccatgagcatggaatgttcttccatttgtttgtaacctctttaatttcattgagcagtggtttgtagttctccttgaagaggtccttcacatcccttgtaagttggattcctaggtattttattttctctgaagcagttgtgaatgggagttcactcatgatttggctctctgtctgttattggtgtataagaatgcttgtgatttttgtacattgattttgtatcctgagactttgctgaagttgcttatcagcttaaggagattttgggctgagacagtggggttttctagatatacaatcatgtcatctgcaaacagggacaatttgacttcctcttttcctaattgaataccctttatttcctctcctgcctaattgccctagccagaacttccaacagtatgttgaatagtagtggtgagagagggcatccctgtcttgtgcaagttttcaaagggaatgcttccagtttttgcccattcagtatgatattggctgtgggtttgtcatagatagctcttattattttgaaatatgtcccatcgatacctaatttgttgagagtttttagcatgaagagttgttgaattttgtcaaaggccttttctgcatctattgagataatcatgtggtatttgtctttggctctgtttatatgctggattacatttattgatttgcgtgtattgaaccagccttgcatcccagggatgaagcccacttgatcatggtggataagctttttgatgtgctgctggattcgttttgccagtattttattgaggatttttgcatcaatgttcatcaaggatattggtctaaaattctcttttttgtttgtgtctctgtccggctttggtatcaggatgatgttggcctcataaaatgagttagggaggattccctctttttctattaattggaatagtttcagaaggaatggtaccagttcctccttgtacctctggtagaattcggctgtgaatccatctggtcctggactctttttggttggtaagctattgattattgccacaatttcagcttctgttattggtgtattcagagattcaacttcctcctggtttagtcttgggagagtgtatgtgtcgaggaatttatccatttcttctagattttctagtttatttgcatagaggtgtttgtagtattatctgatggtagtttgtatttctgtgggatcagtggtgatatcccctttatcattttttattgcgtctatttgattcttctctctttttttctttattagtcttgctagcagtctatcaattttgttgatcctttcaaaaaaccaggtcctggattcattgatttttttgaagggttttttgtgtctctatttccttccgttctgctctgatcttagttatttcttgccttctgctagcttttgaatgtgttttcatctaaatatttgttatattttttgatgaagggcaaaacattttggttacagtttctttgaatatttcattccacttacgcttttcaaccaaatacaataaaaaaagcaagaaggggttgtcattcttttttttttttcatttgttcttcaatttagcattgaaatattaaatccaaaagacaactacctttagtatgagattgtatattttgaaaatgtgcagaggtttaggtattttataatagtgacaatttacatatttataggaaatatagtttcaaatagattttaaggaggcagctgttaaaatttgacatattactgaaacttaattagtaatatcgaaatatttcagataacacagggatgactgagctaacctgattcaacacatcagttcacaatgttgtgaagaacacattgaacattttcatggaacaatgcattctgctgcttacttcaagaattaggaaggtgaataagatgattcttactctcaaagagcttataatttagtagaagaaagacaataagtctgtgtgcccatacatttattaatacaaggtgggtccgggtcatatcttataatttgtactaagtgtcatggggtagaagagaaaaaaacatttaatgtgatttgaaattgagaatgtttgtgtggatatgtattttatataagatacttataaaaaactaaatgcatcaacccacagattttttgtcttatggcctctgttagaatggtagaatgggaagaactatttgggttgttatatacacaggcctagttattattcccttgagtaaaatagggctttgttacagctaacctaataagaatatttcagtaatcaaatatttaaggaacattgttgaggtggcatggaaagtcaacacaaaaaaggaattccacttgagctgtaattttgttttatttgcttagcgtagattagaattgtgatacttgtactgttagttgcactgtacataaatattttgaattactgtcgctgattggaactaccttcgtgctttaaattaaaaaaaaaagatgtatctgtacattctaaatagtaaaaactctttttggctcaaatcttttaattctgaaggaatatactggcagatacttagtagacataaataatcattaatgcatgtatggtgtatttcattcagtagtaccaaaatctaaaacacattgagttgtctggcatggtttcattgccaaaagttgtgatgtgactctgatgtaacctggtttgttctgaacaactccaaatggttcttcagacttgcccaggatccatctggctcctgggaagccttatgttatcatggctataatcccagactctggtgacagtctgcctgggttcaaatccaggctctggtactcactatctgtatgaccttgaggatgttggtttgtctgtttcccttgcaaaataatgaacattatattccctatctcaaagggttgttgtgaggatactctaagataatgcaggtaaaagtgggatgttaacagcatttggtaagttgtaaggactcaggtgctggctatgtaaaaataaacttttttaagatggatagatacatagatagatagatagataggtagatagatagatagatagatagatagatagatagatagatataaaaacctatacctgaaaacattattttcataatatttcaaaagcttctattgtactatctatgcttttatacatagtaaaagcagatgacatgctggtcctactaaatttacaggttaatttttagatagttactaagaaatcaaactgtgtggaattttctggtacaaaattacaatatgcaataccttcctactgaggtacccattactgaatatttcttttctatcatatgtgaaatgcatcaattttaaatatttggagacatacctaatttaagtgaaaatctcggtatttcctgaaagtcgccacactataacagataaccaatcaaatttgtctagcttataatgtctgtcagcctgggtgatgtggatgggccactgtgttctcaactgcactgtctcagtgattggagccagttcatgaagcgctacagcctgtaggatgccaaggaggttctttttcgtaatcacacacaagcaatgtggtaaaaccctcaagggatagcagttgctttcacaatctatttacacacatacacacacatacacacacacacacacacacacagagttctttgttattttacatctggcaacaggaagagcatgctggacagacctctggcatcataaaccatccttccctctgacctctgtgtgaatcagcagactatgatctctgcagaatttaggattaattgcagcaaagaaaaagaacctctctgaaatctaaaatgtagacttggtcattagttcattttgcatgctgtggaaactatatttggcatcattaacagctgcttccatgagatgttgagcactaaaatatgattggtgaacactcaggattttattttgtggtattggttgcaattatggagatgttgatagatcaatttccacatcatctaaacccttaactaagaaataaagtggtacataatatgcatgtcccctctatatgagactttgttaattttcttaatttaaaaaatttttttaattctatgaaggaaaagaaatttctctttcagctgatgtttccctgaacacacattgtgatcatttactatttcctaagtgattcaagcagcaatcttgttttagaatatttcaactgaaatgccagccctggaatttcagtgctgattttaggaattattctaatgacttcttgacaagctttacctacatcaggagcaagtgaacttggcagagttgggataggagacttgcctccaaaatgttaacttatatataaccaccttgttatcgcattagttgttttcatggtggctgtggtggtcaatagcagaggcaatggaatgagctgtaataagagtcagcaaatctgagtggacttggcttctcccgtttgccatggtgtaaatatccccaccatgattgttttcaggctaccaacatgatgtcactaaatgtggaattgagaagggatgtccaaaatatacatcaataaatcagccctcatttgattttcttctcagtgaactatgtggttaaatgacttttatctacctttatctcgccattagcaggagacattatggaaaaatataatgccataaagtcacctctatgtcattgtccttgttagaataaaaattaagacctctaggtttacttttatgggttgagcctttgacctatctgtggaagtggtaagctggaacaacaaagaggaaaatgagagtctgtgcttttaggcaggtagttaatgaaggaccaggtaggaatgaagaagccaagttctagtccaaattgccattgattatctagaagattttggacaattcacttcatgcagtagctcaacatccatcaaagagtttttgaaagtctattatgtgccaggtgttggaagatgtgaaggtgaacaagcagatgatttcaccttaaaagagcttgtagcttagtgggaaggaggaaaaaaaaggaagtaataataacaaagtaagaaaagagctagcatagagctggggaagcaaaacacacagaatgaaagtggaacctgatcttgcagagtcctggaagggttctgggaagagatgactgtgtgctgagcaaggaagaatgaatagaaagtaggcaagaaggaagggtgagatgagaggcttcttgatttgattccagatctcaggttttatttcaccgttaagtatgatgttttagtctctcttttcttttttagaaaccttcactatgttaaaaaacagtttttttctattttttaattggcaaatagttttttttaaatcacaagtaagtattgtgtaattgtgtcagatttttttctgcacctattaaaataattgtataggttttcctttattctttaatgaggtgatatcatatcaaatattagaccaatattatgtatctgaaaaaatatgcacacacacatataaatgagtgtatttgtgtgtatatgacttttgagaatacattaatgagagagattgtactgtaagttttttctaataatacccttgtgatagcaaggttataatggccacataaaatgcattactaattgctttttatttctctttcttggaagagattgtgtatgattgctgtaatttcttccttacgtatttgggagaattcaccagtgaggccatcttggcctgaatttctattctggaaacgtttaaaattactggttttatttatttaaaagatttagggttcttcagattttacattcttctcatgttaactgtaagttacagtttttctttttttttaatgtgttgttattattttttgtatatgtccatagggtacaagtgcagttttgctacactgatgtattttgcattatggtgaaggcagggccttcagtgcctccatcactggaggaaggcacattgtacccaccaagcaaccttccatcatccactatctcccacccctcacccctctaagtctccattgtccacacattcatgatggacagtgtgcactctgcttccatgtgcacacattatttagctcccatttataagtgagaacatgcagtatgtgtctttccatgtctgaattattacacttaagataatggcctccagctccatctttgttgcaagttggtgtttttcaaaaaatttccttatttgggttgggcacagtggctcacgcctgtagtcccaacactttggtaggccaaggtgggcagatcacaagatcaggagttcgagaccagcctgaccaatatggtgaaaccctgtctctactgaaaaaaaaaaaaatctaaccgggcgtagtggtgcacgcctgtagtcccagttactcaggaggctgaggcaggtcgcttgaacccaggaggcagaggttgcagtgagctgagattgctccactgaactccagcctgggcaatacagggagactccatctcaaaaaaaaaaaaaattgcttatccattttattcaaattgtcaacttcattgacataaagttactgttcttatctttttgacatctgtaggatctctatcaatatcccttttgtttttatacctgatattggtcattcgtgctgtagtttttttcctcaataaggcttgttaagagagttttaattgtattagattttcccaagggcaaattgctggccttgttgatgttctctattgtacacttttttctgttttataaatttgtgccttttttttttcactttttctcatttctatttcctttgggtttgatttttcttttttgactttttgaattagagtatagattattgatattcaactttcttcctttctaatatatgcatgttaggccgtaagtttctctttaatgagtttcagctactttccctaggttttgacatggtattttctatattatttaattcaaaatatattctagcattcattgtaatttttctttaatccaggggttatttaaaaaatatgttgcttaaatttaaatgatttgaagattatgtagttatttttctgtatttgagttctagcttaattctaccgtggtcagagcatatggattgtatgattttggtgctttaaaatgaacttgttttattgcttatcatatggtccaattttgttaaacattcaatttgccctgggaagtaacatgcattttgcttattttaaaagcagtgcattataaatgcaaattaaggcatttatatataatgacatatatatgtgtgtgtgtgtgtatacatatatatgtatacatatatttgcttttgacttgtttcctcagctactgggagaggtatgtcaaaatctcaaactttggttgtgaatgtactattctttataaaatttaaaactgtgttattaggtctataaacattaagaatgtttgtatatttttggtgtaatgacccttttatcagtatttttttcatatttatctctagaaatgctttgaagcctaatttgttattaatatatcaataattgtatttcaaactagattattcaattcatgtaaacccgatgtagttaatactttatgacaaatttatcgtgcttgagtttggtcaggattctcaattctatatttgatgtcttttatcaagttttgtaaatacttggcctggatatactcaaatatttcttttatctcaatctttatctctccatagcttttgggattctaattacttgtgtcttattcctttatgtcatgtctttatgttcttttctaccatttttatttttttctcaatgttttcatccagaaatttttctgacctattttcttattaattaatcttcttcttctgtgtcaattctgctatgaagcccgtccactaggttttaaattcaattatagaactttctgttcaaaaatttccactttattctttatcattgattttatttcactggtaaaattatctgtctggtcatctttttaaaaagtaatatgaataacagttatttattctaaaatccttatgtaactgtaatatttaaaccatccaccaggtccatttgtgctgagttttctcctggttttcagtcatttgattttgtatgtatgtatgcttggtaattttggattgggtgtcagaaattgtgtatgaataaaatgtaaaggttctggatgatgatctgttatctcagagaggaatgtattttcttcaggaaggaatttaagtacagatagaccagcttgatgcagttagaaagtgagacgattcaaggttttattcctgtcattctgacagcttgttattttcagtttctcctttgtcctaggatacagcccttcagaggtctcaaatgaaagacggggccttttttctttataggtcccaaactccagtttttgtctttcagttccattaaactatggaaagctctgagctactgttttctgttcagcctgtctgccccatcctgcttgtgaataagcagttgcctcaagtgaaataattttcctgctttctggatcttggtctgtcaagttctaactgtcttaatcattcctcagtatcttcaaacatttcccctgcatttatagttgttataagtactagtatgatctaagctattctgttatagctggaagcagaaatgctgccatcgaaagagattaggcattggaataatgtgatctgatttgcattttaaaaagatttttctgaacaacaatatcctcatatgtgcaatgaaacattttgataaaaattgttctctcaggcccttttcagctccaatattctgcaagtcttgagagtactaatagtgtgtcataccatgatttcaagctgtcaaaaccccagggcttttagttttagtaggctaaagttagaaaagcttagactctggggaaaatggccaagaagaagactctcatctttggtgtctttctatgtggcttcatcactgtacttcttgttagctttcagcaacatcctctcttttctgggtcttggtatctgggcacctagactatttttccagtaacctgaccactctctcctcatgtggtggtgccccattccacactctcttctaaaatgtttcatacttgagatttaaaattcactgtccatcctgcatttttctgattttttttagtaataaattaacatttattgggtagttatgtgccagacactgtgctaaacacttagatggaatattttattccatattagctctatgaggtagggacaattattatccccatttacagatgacaaaattgaaagttaggggagtcatgtagcttacctaatgttacagaggtaaagtggctgagatgaattctgatccctggaatgggcatcatttagaggggtggttcccaaaagccagtccacagactgtcttgttctctaatatataaaaaataattcagcaacatctaggagcataaatccagagattctgaatcagtagttcttggatggggcccagaaatctgaatttttttttccttttcaatgattacattttagtttactgtacaatgaaacagagaaaactactttttttttttttttttttttttttttgagacggagtctcgctctgtcgcccaggctggagtgcagtggcgggatctcggctcactgcaagctccgcctccggggttcacgccattctcctgcctcagcctcccaagtagctgggactacaggcgcccgccactacgcccggctaattttttgtatttttagtagagacggggtttcaccgttttagccgggatggtctcgatctcctgacctcgtgatccgcccgcctcggcctcccaaagtgctgggattacaggcgtgagccaccgcgcccggcctacttttttttttaaagatctgagagtgtgaatcttccacctccttttcaaccaaagttgaggaatttgtcctgctataatctcaacccttgagtatttctttttttaaaaaattttattattattattattataatactttaagttttagggtacctgtgcacaacgtgcaggtttgttacatttgtatacatgtgccatgttggtgtgtgcacccattaactcgtcattcagcattaggtatatttaaaaaaaaaaaaaaaaccttgttatctcagtatgtttttattatgcaaatttcctctaaataatgaaagctcctttttaatgttatattatgatagcaaaaggtgtgctctttgtagagttagcaggatatggttgtgtgacaaaaagccaaatagtattttaggctccaatgaagaggaatatctgtgaagggggtctttcttggtatttttgaagttccacttgaaagtgctgttggccatcactaatcatgagggaaatgcaaattaaaatcacaatgacataccaccttaccccccagccagaatggcgattagtgaaaagtcaaaaaacatagattttggcatggatgtggtaaaaaaaaaaaaaaaaaaaaaaaaagatgtttatacactgctggtgggaatgtaaattagtacaatctctatggaaaacaatatggggatttctcaaagaactaaagacagatcaaccattctatccgacaatcccactacttggtatctacccaaagggaaggaagttgctttatcaaaaagacacctgaatgtgtatagaatcatcctaagtgcccatctactgatgagtggataaagaaaatgtggtgcgtgcatgtgtgtgtgtgtataccatgaaatactatatatatatatacacacacacacacacacacaccatgaaatactattcagccatttaaaaagaatgaaataatatcttttgcagcaatttggatagaactagaggccattattctaaataaagtatttcaggaatcaaaaatcagataacacatgttcttacttatgaatgagagctataggtatttaaaggcatccagggtggtataacggacattggagactaagaagcggggaggctgggagtgagggtgagagagaaataactatgcattgggtacaatgtacactacttgggtaataggtacactaaaatcctaagcttcaccaccatacaattcatctctgtaaccagaagccacttgtatccctaaagctattgaaataaaaaaaatcacaaagtgctgttgcctactccacagccatgcaagtttgattctggatctgagacaagctatgatcacattgttgtagagaactgaggtccttggaaaataaaacacaggttcccaaccagaagttaattttattctgctgttaaaatggaactatgacttttcttatttataagaactgtccttcctttttaaggttaaaacatgttattttattataatgcaaataatattcattatttaaaaatagaaaaataagaggcagatgtagttctagctcttaataaacctggctaaacttttacaaatttcatctgatcatttatatacttttctacatgattggacttatttataatttggatttttgaatagtgctttaacattttttacttaaattgtatacattttatagattatctcttgataagcattattttaatgatatatatgtataaataatatatattcttacataatacacacacatgtctatgtaatgacatatatataatattttgcaatggtgcatatgtgcttgttcccttaagatggatatttatttgactgttttcttattgttggattattttgtttcataaataacattctatgctgaaaatatttttaattgctataaattgcccaactaagacatataacttcctgttatcctttcactacctttgataacacactaaatttttctttactatatttcattcccttcttaatctcatttctaaaaactgtatttctgtcttacaatatatatatcattccttcagtactcctacctgttgatcttctcattgttatttactggcttgtcaggtcttggaagataggcttctcatacaacccaagcctgtcttttgacctgactataaatattttattgtttacatcttcccctgcaaagaattcctctaggatctgcccctttcttgttctccaggcagtatgccttggacattctgtagctggctgggactgattccttgccaggtcagtaggacagatgtgtagactaagaaattaactagtgagttcaagtggaggttcctggcctgttggtgcctgtgaacaggattcttttgagtatgattagtgacatgaaggtcctgaataatatcgtaggcagaagaagtgccattactactcacagtgtaagaagtagcttgagttaactggtgaaagagctaaaagtcaatgaaaagtattgaacttttaaaatgtattatctattgaaaagtttaaaagatcatttattgattaaggaaattcctttgactttaatagctgtgagctctaatgggggctagaaactccagcaagtggtacagtttctagaacctagcagataatttttcattgactagaattccatgtgtgatacaatgatttggcaaagtaaatcacaataattattatgttcattgttttctcctttgtttaccttgattaaccatctttggtgattgtttcataattgttgctttctaaacaactttattgaagagctacaaatggctagctcttctcaaccctttaattagtgtctgggatcggtggatgttagttgaggggaaaaggttattttaataatttaagacaaaacaatttagaaattgtatttttttgaagacaacttgctatgtaaccttttataattccctgaatttttctgaaattgatgttttctttagtgtatagcagtgatagcatgaaaccaccactgacttttttagggcaacttgctggctaattttataaaatttgaactgcactatatgaatgaagaatcatctgtagcaattgctcttttccaaatgttcttttgcttcaaatgccgtatctgaatattagattgtttctccagatgttacaggctcatgtttccttctgctgaattcaattgttggttcctgcttatgtttctcaggatttgtatcatttctctgtcttaagtaaggtttttataaatgctcatcaatgttgtagagtttggattcaattcagatagaggctatttccaccggacttttgctcatctacttcctccctggagaatggtgaaaaacagtcctcttttccctcctctgatagggtgatgggctactattgctttctctctcctaatatattgagtacaccgacctctcaccgaaaccttaggtcaaagtgagaagaggtgattgtttttaattggatgattgctaccatatacttctcttttggtgggatcccaaaataaataaataaataaatgacactccccccaaaaaagaggaactaaaaaaaggctgagaaagcatgccatgaaggtccaggcttggacaacaagcataccatgatgtgaattttagccccatcacctactaactgtgtgaccttgggcaagcttttgaactcaccagggcctcaatttcctaacctataaaatttttgtgatcattattataattacaactaagaataagtaccttatcgttttgctgcaatacacgcgtgataattgtcctaaagtgcttagcatggtgtctagaacgtattatgtacttaataattattgtctgaaaaaataaacacatgaagaaaataccttattgtcaaagaatataatactgtgccccaacttgtgaaagattaaacctcttgtgtctccaggatttctaatagcttatcccagaaaggcagtgcagaggacatgtgggctctcttcctactgcagactcgggctgttctgatggtggggtccaagggcagccttgcttctgccatttgctcagttgatcttgtgaacagctgcggttcttgctgtaactacttgctcgctctcagtgactctgtactgtaaatgtttcatgtgaaggagcactgctctaaaacaaagctggaagacagggaggcaattgccagagctgtcattgtgctgagtcagggaaggcttcagcaatcatccaaagagatgtggcatttacacctgcagctggatgggttatgaacccaaataggtccttaaaaaggaaggctcatctcctttccccccaacagccccccacccactcaatttttgcctactttaagggaaggtttttggtaactaatttttcatctgctcattagagcttaccaattacagcatgtgttacaaattataggttccaggactttgggtgaaatatgcttcgtaaataatggcatattttgctgtgagcagtccttgattttggactcttgcattacctttcatctcgcaaattttccgtataggaatacttggatgtacaaatttcaggcaagtatccgatgtatcttatagaatcagctacccgacaatattgtcaaaaagagaagcaacgctttcagatgatgtaagcatagaatcaagcaaggagttggttgaatccttcttgtgcttttcctttgagatcaccttatttcagaatcctaggaggattgaaacattcctactttgatattttcctctggagatcacttgttaaaagtcgtcaggagtgacatttactagtcttgtattttctctggtcttaacttgaaaagttctgctcatcaaaaatgagtatgttgagatgatattttctatagaaattttgtattttacccccttaaaatcctcacttttcacatgaaagtgtatgctcagataaaacaagactcatggagagcacatgggtgagatcatgctaggctctcattgctaggctgagatttgcatttttctgaaaatcagagtgctgaattttcttagctttgaagtagctaatgggacagtgtgtgtatatgtgtgtgtgcccacttgcatataattccgaatcacttgtttatgtgtagtatatgattctatgacaaagagctccctttaatgcaaatgtaaggcattcatgagcatctcatgtataagctcatattttgaactttgtttttcttttactcaaagaatttacaaaatcattttgtggtttgaaaagtaattcagatttcctataaaatgttatataaaattttaaatttagattttagctagcaagtattggcttaactgtagaaagaacttcattttctaggaccattcaatagtctagcttctgctttatgacaatctactcgtgttttttaaaggataataatattaaaacatttttataaatctcacaataatgctttatgtatattaactcatttggtccccacaataaccctgatggatgtcattattattatcctcgttttttttttttgagacagagtttcactcttcttgcctaagttggagtgcagtggcaccatctcggctcactgcaatctctgcctcctgggttcaagtgactctcctgcctcagcctcccgagtagctgggattacaggcgtgtgccaccacacctgtctaattttttgtatgtttagtagaaatggggtttcatcatgttatccaggctggtctcgaacccctgacctcaggtgatccactcgcctcagccttccaaagtgctgggattacaggcgtgagccactgcacccagcctattatcttcattttaaatatgaggaaactgagacacagagagagaatatacattaagatcagaaagctagaaagtctaggaactaagattcagaacaaaatcatctgattccactctctgtgctcttaaatacttcactagaataagtcttattttttataattgatacaactggtctaaatattaatgaagttttaagattcaatttacatatagcttctgtctctgtaagttaccagttattactacctaaaatacacttgtagtcaatagtaacattgaatattcctagattttattttataataccaaccagaataggaggcctcaaaacacctgtgatggaaaaaatgcagtgcctgagtgcatgcagctaagcctgatcactagaatacatttcatttatattttataagataccaaagacttcagaactacaaagagaactatagttgctgcaaccagaaacctattcacatatacgtacttttataaatcatgtgcatatgtgtgtgggtaccttcatgtgtgtgcatatataaatacatctaaaagctgagaaccaccttagtctggggcattaaaattttagtaaacttttttgatgtatatgttgaataagttgcaaagttgaagtctgttccctgcctccatgtggcttacgtacacttgctaatgagaaaggagcttattacaaatattcatagatgtgatatatatgtgtacatgtgtgtatatatatgtgtgtgtatatatacatatatatgtgtgtgtatatatacatatatatatctttctccccctacacacacatacacacacccctttattcgctctctttttttttttttttttttttttagttggagtctcactcttgttacccaggctagagtgcaatggtgcaatcttggctcactgcaacctctacctcccgggttcaagcgattcccctgcctcagcctcccaagtagctgggattactttctactatacaaattttactgtcatagacattggcttttgtacctccaaaatgtttgttattatccacggaaagggtacccacattttacttctatggataaattacacatatattgactgatagctactatttaatgaaactttttttgtgtttcagggtctcaactctatctttctatctatctacttatctacctacctatctatttttttctcaattaattccagaatgttaaatttcatgatggcaaaagtcattattaattttgttcactgacatactaagcacttaaaatgctgcctggcacatgtagagactcagaatatgctttcagaattgaatgaaaatatcttgacaaggtagcacagtttttgcttttgtttttgttttaatagagtcagggtattgctctgtcaccccacccaggctggagtgcagtggtatgatacagctgactgcagcctcgaactcctgggctcaagcaatcctcctgcctcggcctcctgagtagccagtaccacaggtgtgtgccaccacgcccagctaagtttttattttttgtattttttttgtttttttgagatagggtcttcctcagtcttcaggtacaatctcagctcactgcaacctcaacctcctgggctcaagtaatcctcctgcctcagcctcccaagtagctaggaccacagacacacaccaccacacccagctaatttttaaaaaattatttttagtagaaatgaggtctcactattttgcccaggctggtctcaaactcctgtgttcaagtggtcctcccgcctcagcctcccaaagtactaggattacaggtgtgagctaccacacccagcctaatattttattttttgtagacacagggtccccttatgttgcccaggctggtctcaaactcctgtgttcaagtggtcctcccgcctcagcctcccaaaaggttgggattacaggtgtgacccactgtgtcagcctctcattgttttccatctgacaggtgagaaactgaacctcagagagcatggattactgacccagtatcacagctagtgcagtgcagaagcaggagtggaacctccatttggctccactggccagactccctatctgtgactctgtctccaagaagctcttcgaggccagacagcagcatcttctggggtcttttaggtcacaagtatccctggtcttttcatgactacacatttctggctgactttagagctctagatgtttttctcctatgttgatctaccccgtaaggctccatgagaggcttggactattgtttcacagtaggcttcctaagacattttgcttagctccttgaaggcttccacctgctcttgagcttaggaggagaatatggcctagtcaaagagagaagagcataatagcagataggagtaagtgagcaggaaacacagagaaatggtgaagaggaggaaagaatggccaatagaagatggaaaggcagcagtcacggtcacaaaaaaagggtccagaaacaatacaggagatgcacaagagatttcattgcttttaagaagtgttatgctaaaatatcttcctctatagggaaaagacaatggcaaagaacttttaaaatttttatttggctacttctatttaagtattaagtatatcgcggtgtacaataaatgtttacttaacaaaatacataaaactctttcctgggctaaaccttgaaagacagtcatacatatttcataagttttttgttgtaaaatatttgatgatttcgcagttagggggtttcttagaaagtgctatacataatcagatataacctttccattttatatttccttgtgtaagcaccatgacttctagtaatcttgagtgtctccccttttcaattcacttaggaattttgcatttaaactattgcccttgtttagggagaacaaaacaacacatccaaaaaaatgaccaaatgtgtacaacctggtattacatttctgatttacataatttccacctcagaaaagttttcttaaatacaaaactcactcactttattttaatgcccgaaagaatagcccagataaatggactccaaatttgaggcctgagtaataatgcattttaggattagactagtcatccttgctattttcgtggtgttcatcacgtacagagtacaacaagatactctattatcccttcaggctgttggataaatacaaataagcacatacaaccaaaacaaatcattgtatctgtgaattgaaatgcatgtcataagaactttaatctggtgcaattgctcttatagccaagtaaatatagtcagcaaagcttaccttttatgttaagcattttacagattacatatgtaagataaatttaagatttgtgtttaaatgacttttaaaagtaaaaaaagcattgggaagacttcttactcagaggttgtggtcagtcattttcaaataatttttcattgccaacatctcatacataaacttatataagcttctacaacccctcccagagtcagccttctctcttctttcagtaacatcctgtgttgccatctgactgaactgcaccatttgtcaccagttccaacacatcttgtcaacataccttttctattggaagaaaaaaagaaaatgggcttgaataaaaacatgtaaataaatgatgagcactttgctcttttggttgaattaaacagtgttgaaaggtgttagctagagaagacttaatagaaagtataacattttaaataatgtttaaggggaaaaagaaaaagatattttaggtttcagaataaataaaagataaaaataaataataaaagattttaagtattagggatgacttgcaaaatctcagaggtaaaggtaagaaacactagacagaaaataattttatttgaatttaaaaaatgggagagaatccacagaccctttgagggaactggatcatctttgcagactccctgagatgtcgaaaaactgtgagtctgcttgctttctcaatggggatgctcatggtatggggcaatttctcagccctgatcatctgctgcctggaaatagactcagtgctgttggtaggggatggtgggagtgagaccggcctttaggactgcaggctgcatgggagtggggtgaggcctgtgattgctggctttcccccacttctctggtatcctgtatgactcaacagtggcagccataatccccctgggaatacaacttcattagactgggaaccacatccccatcccccacagcagccacagcaagccctgccaaaagagaggctgaactcagacacacctatccctgcctccacctggtggtctttctctatcagccctggtagctgaagacaaagttcataatctcttgggaggtctatggccctgtccactgcctaagaaaccttaatactcaaccagatgtccctagggcaagtttgcaacctgtctataggaccacagctgatgcactcttgaaaatgacacctcctggctggaggctaaaccaaaaccagtgcattaaacaaaaacacaaccaaggacctcacagagtccacttcactcccctgctacctccaccagagtaggtactagtatgcacagctgcaagacctgaagagggatcgcatcataggactctgcagatattccccagtacaagcccagagcccagtagctccactgggtggctagacccagaagagcaaaaacaatccctacaattcatctctcagaaagccccattcctaggagaagggggagaacaccacatcaagggggcacctcatgggacaaaagaatctgaacagcagttcttgaatcccagatcttccctctgacatagtctacctgaatgagatgggaccagaaaaacaattctggtagtatgacaaaataaggttatttaacaccccccaaaaatcataccagctcaccagcaatggatccaaaccaagatgaaatctgaattgccagaaaaaagaaaaattggaaggttggttattaagctcatcaaggaggcaccagaaaaaggtgaagtccaacttaaagaagttgaaaacgtgatacaggatatgaaaggaaaaatcttcagtgaaataaagagcataaataaaaaacaattgcaacttctggaaatcaaggacacacttagagaaatgcaaaatgcactggaaagtctcagccatagaatcaaacaggcagaagaaagaacttctgagctcgaagacaaggcatttgaattaactcagtccatcaaagacaaagagaaaagaattttaaaaaaatgaacaaaggctccaagaagtttgggactatgttaaatgtcccaacctaagaataactagtgttcccgaggaagaagagaaatctaaaagtttggaaagcatatttgagggaataattgaggaagatatccccggccttgctaaagatctagacattcaaatacaagaagctcaaagaacacctgggaaactcatcgcaaaaagatcattggcttggcacacagtcatcaggttatctaaagtcaagatgaaggaaagaatcttaagagctctgaggcaaaagcgtcaggtaacctatgaagaaatatctatcaggttaacagatttctaagcagaaaccctacaagttagaagagattggggtcctattcttagcctctttaaacaaaacaattattagccaagaattttgtattcagcaaaactaagcttcgtaaatgaaggaaagatacagtgtctaccaggcacacaaatgatgagagaattcaccattaccaagccagcactacaagaactgctgaaaggagctctaaatcctgaaaccaatactcaaaatacaccaaaatagaacctccttaaagcataaatctcacagtacctatataataataacacaatgaaaaaaaaaaacccaacttattcaggcaacaaatagcatgatgaatagagtagtatctcacatctcaatactaacattgaatgtaaatagcctaaatgcacctcttaaaagatacagaatggcagaatgaataagcattcaccaaccaagttttcttctgtttttcaggagactcatctaacacataaggactcacatcaacttaagataaaggggtaaaaaagatattttatgcaaatgggcatcaaaagcaggaatagctattcttatatcagaataaacaaaatttacagcaacagcagtttaaaaagacaaatatgttcattatataatgttaaagggattagtctggcaggaaaataccgcaattctaaatatataagcacctaacactggagcacccaaatttataaaataatcactactagacctaagaaatgagatagacagcaacacaatagtagtgggggacttcagtactcccctgacagcactaaactggtcatcaagacagaaagtcaacaaactctagcctgcaacaaatgaacttaacagatatttatagaacattctacccaacaactgcagagtatacattctactcatcagcacatggaacattgtccaagatagaccatatgataggccacaaaacaagtctgagcaaatttaagaacattgaaattacatcaagtactctctcagactacagtggaataaaattgcaaatcaactcctaaaggcatccccaaaccatacaaatacatgcaaattaaataacttgctcctgaatgatcattgagtcaacaaggaaatcaagatggaaattaaaaaattatttaaactgagtgataatagtgacacagcctatcaaaaccactgagatacagcaaaaaatggtgctaaggggaaagttcatagcattaaatgcttacatcaaaaagtctgaaagagcacaaatagacaatctaaggtcacacttcatggaactagagaaaaaagaacaaaccaaactgaaacccggcagaagaaaagaaataacgaggatcagagcagaactaaatgaaattgaaacaaacaaaaacaatacagaaaataaataaaaagctgtttctttgaaaatgtgaatgaaattgatataccattagtgagattaaccaagaaaagaagagagaacatccaaataatcgtaattagaaatgaaatgggagatactacagccaataccataaaaatacaaaagattattcaaggctactatgaacacctttacacacataaactagaaaacctaggggagatggataaattcctggaaatatacaaccctcctaggttaaaccaggaagatatagaacctctcaacagaccaataacaacctgcaagattgaaatggtaataaaaaaattgccaacaacaaaaaaagtccaggaccagatggattcacagctgaattctatcagacattcaaagaagaattggtaccaatcctactgaaaatcttccaaatgatagagaaagaaggaatactctctaaatcaatctacaaagccagtatcaccctaatgccaaagccagaggacataacaaaaaacgaaaactacagtcagtatccctgatgaacatagatgcaaaaatcctcaataaaatcctagtgaattgaatccaacagtatatcaaaaagataatccaccatgatcaagtaggtttcacactagggatgcagggatggtttaacataggcaagtcaataaatgtgatacaccacttaaacagaattacaaccagaaatcacatgattgtctcaatagacacagaaaaaccatttgacaaaatccaatctccctttgtgactaaaaacctcagcaaaatctgcatagaagggtcataccttaaggtaataaaaaccatctatggcaagcccacagccaactttatactgaagagggaaaagtggaaagcattcccactaagaactggaacaaggatgcccactttcaccacttctattcaacatcgtaccaggaatcttagccagagcaatcagacaagacaaagaaattaagagcatccaaaatggtaaagaagacatcaaattgttgctgtttgcagatgatatgatggtatacctagaaaccctaaagtttccaccaaaaagctcctagaactggtaaatgaattcagcaaagtttcaggatacaaaattaatgtaaaaaattagtagctctgctatacactaacagcaaccaagctgagaatcaaatcaagaactcaacccctttcacaatatcagcaaaaaaataaaatacataggaatatacctaaacaaggatgtgaaagacctctacaaggaaaactacaaaacactgctgaaagaaatcatagacaacacaaacaaatggaaacacatcccatgctcatggatgggtgaattaatattgtgaaaatgaccatactgccaaaagcaatctacatattcaatgcaattcccttcaaaataccatcatcactcttcacataactagacaaaacaatcctaaaattcatatggaacaaaaaaagagcctgcatagacaaagcaagactaagccaaagaacaaatctgaaggcatcacattatctaacatgaaactatattataaggcaatagtcaccaaaacagcatggtactggtataaaaataggtgcatagaccaatggaacagaatagagaacccagaaataaacccaaatacttacagcccactgatattcaccaaagcaaacaaaaacaaagtggggaaaggacaccctattcaacaaatggtgctgagatcattggcaagccacatgtagaggaatgaaactggatcttcatctcttatcctatgcaaaaatcaactcaagatggatcatatacttaaatctaagatgtgaaaccataaagattttagaagataacatcagaaaaacccttctagacattgacttaggcaaagacttaaatgaccaagaacccaaaagtaaatgcaacaaaaacaaagagaaatagatgggaactaatgaaactaaaaagtttctgcacagcaaaaaaaataatcagcagagttaacagacaatccacagagtaggagaaaatcttcacaatctatacatctgacaaaggactaatatccagaatctacaaagaattgaagcaaattagcaagataaagacaaacaatctcatcaaaaagtgggctaaagacatgaatagacaattctcaaaagaagacatacaaatggccaacaagcatatggaaaaatgctcaacatcactaattatcagggaaatacaaatcaaaaccactatgtgataccaccttacttcctcaagaatgaccataataaaaagaaaaaaaaaaaccaacaaaaaatagttgttggcgtggatgcaatgaaaagggaacacttttacactgttggtgggaatggactagtacaaccattatggaaactaaaagtagatctaccatttgatccagcaatcccactactaggtatctacccagaggaagtcattatacaaaaaagatacttgcacatatacctgtatagcagcacaattcactgttgcaaaaatatggaaccagcccaaatgcccatcaatcaaccagtggataaagaagatatgacaaaaatatttatatgtacacacacgccatggaatactacttagccataaaagcaacaaaataatgacatttgtagcaacctggatggaattggagattattattctaattgaagtaactcaggaatggaaaaccaaacgttgtatgttctcactcatatgtgggagctaagctatgaagatccaaaggcataagaatgatacattggacttcggggacttgcagggaaagtttggggactggcgaaggataagagaatattcactgggtacagtgtacactgctctggtgatggctgcaccaaaatttcagaaatcactactaaaaaacttactcatgtaaccaatcaccccctgttccccaaaaacctattgaaataaataaataaataaataaataaattgaatgaatgaaccaaaggtattgcacgaggaagcaacataaataaacttagtgagtgaaacagtgaagaaaggggcaatgtgatggtggtgataggtatacaggttaccttgttcacccttttaatactgtggataaacagaatcaagtaatttgttcagctaactagattccatgaaaatatgtagccatttttctggctaaatgtaagaagagggaatgaacaattgggttagaaccttcataaaaagacatccacagggaagctacaaagatttcttatggtccccaacaacaagttcgcatactgtgcctaccttgtttttctcacagtttgatttcaatcctctcacattttgtgaggtggctgtttataccaatctgtggcctaagatattcttatgactattacttgtttatcaaaatggtacacattcttcagttgcagctccacaggctttctggaactactgtaattaacattgatttctttatctctttccttatttgtcatgtatgattagcactacatagaatgacatttactttttctcctttttcttttatatgtgctaattctgtctctttagcctagtcagaagctctgagttcgcagaataaccatgaacacagaattaaaggtctagatagatcttgtctaaccctttcattttcaaagaaggaaagtttgtaaaatggaaactacagtgatattgagtgtatactatgtgtcagacagctttaacatttttgtatgaatcactcgtgttgtcatctcaaaggtcatatggaatacatactattattgtcatcattttacaaatgaaaagaacgatatgcagagaagtggcttgctgagggcacacagctagtaagagacagtgctgggattcaactctagaccttctggctctagctcttaactttccaagttagtgctgcaggtagaacaaaaactctgtctcataacttctttctccatttcagggctcttgcttgttctaactaatttgtaccaccataattcttatactagagcataataaaacaaaagagatgcaagtgtttattaacttcagccttgtatttcacagatcctaaacatgtaaacatacacctgatacactctcatcctttccgaagagagcaagtaataatgttatactgagtgattaatgaactgatgtaaggactcagtaatccgcatgcaattagtggatcaacaaagcaatttacgcagtaggtatgtattttgaatagtattctttctgtagggaaccagctgtatgtagtgtttaattgaatgcttttgcatcacagagtgatttggagtcaaatcatcaaccgcatttcccaatgtgtcaagtagacagttaacttatcaaaacttccgtagtactcagttctcttccaatgtgctccttatcttgaattcttttgaaatagtgtgccttataattttccaggaatgatttacatgtattcctgttcagagacagagggatggattacataacattccctgaggccctttttgccttcgagtaaatgctctttatcattctaagcttcttactctgagtaatatttgaacatgaccctgtggattccccataacaatttctgatactgtttccctagttgatatgtttggatattttccatactatgcaggctgaattctctttttaacttagtatgttctttttcactctgatgctttgacttttgccatcatagttttctttattttcagagtttatcgactgtcactaggctttcttctgagtcctttcgccaagtcatccatactttgctcttctaatcttctgttataacaggcttcctgttacttatatttttgctgttatactctgaatttgttccagattttctggtagagatttccctacaccaaaaacagtattccaggtgcagccacttgagaattgagtagagataaatatgtgcgcccctttttactgtgatgtcttgccatctgcagttcggagcctgtaaaagttagatttgggattgaaaataagacttccactaggactgccatttgcagcacaaactcacctggatggtaactgctgtctagccgcagctccctttcgacaggtccttctcagaagacttcttttccaggcttttttcttcctgtgcatatctgtgttttcattcattttcccctggtgaataagctggccctttcccaacctgactctcatcttgttatttgatcccaagatctgtaactcctctcagaccatctgcattatttctctgtccttgctgatgttttgcaacattctccagctgactatcatctgcagatttcattagcacaccatttactatgttctgaagatcattaataaagatgaataaacagaagagaagaccttctgcagacatctgtggaatttctctgggctgcccccacaactcgatcgccattgttttattttacctttttggttttttgcctagtgtttcattcacttccctccataagcaccctgttgtcatatctgagtaactgcactcataatgtgtgattttcttgcacagctttataattgcctaaacaattcatcatttgtctgacagcatttttcctttattaaatcccagttttattgacagttttcattatcttctagattgcagaagctatatgtaacaatgtgtgtgcccattctgatttctcctcaatttattactgttttaaaacctgtactatagatgataggaagagagtacgatgagaagagatagactcagaatctctatggctcttcttggaaaaacaccataatgtgtatggaagatcatgcatggggattttcctgcaaggcgctaacagtgaactttctatccaaaaagatagaaagaagttgtctctggttttgaacaatgaagatttatatctaacttatattgaaaaatcaaaggattagattttttaaactgaataagaaccatagctgtacttagagaatatctgtgatgcacttggcactgtgataagatgtgatgtatatcactctttatgattacaccaaccctgaatggcacttattttcaggtgtgacactagcctatggcggctgtcatgaggattagaaaatggtgtcccctccaggaggatactgcctgtgcctgagaatagagcacaggctgcatctaaggacccactgaccttctaggccagatatctttgtgtgtggcagagcctgcctaaatgtacatggaagccacgatttctttgtcatttaaatgaagaggataagatacctataaaagatagatttgagattgatactaatgtggttcctccatgccatattgtttctctgcacatagaacaaatatggatctaactcatacttctgtgattgcctactaaattcaaacagtactttgtgtttttacttagaaaagaatggatatggccgggcgcggtggctcacgcctgtaatcccagccctttgggaggccgaggcgggtggatcatgaggtcaggagatcgagaccatcctggctaacaaggtgaaaccccgtctctactaaaaatacaaaaaattagccgggcgcggtggcgggcgcctgtagtcccagctactcgggaggctgaggcaggagaatggcgtgaacccgggaagcggagcttgcagtgagctgagattgcgccactgcagtccgcagtccggcctgggcgacagagtgagactccgtctcaaaaaaaaaaaaaaaaaaaaaaaaaagaatggatataatttaatatgtaaccttctcttccaatctttagctatgctgttgattttcttcccagtcttcagctatgttgtttttgttattgtcattattattattattatttattactgaatctagaaagaatcatggagaagaagcagtattactctgggccaggtattctttgtaatatctttaaaatacatttgaactctgttcacatatccctttgtttgcctattagatccggtcaacattatgcaaacacacaccttcatgatattgaatattgatcaatttagtcacatgccatgcaaacgtagaaataccacttaatggctgggcatggtggctcatgcctgtaatcccagcattttaggaggccaaggcaggtggatcgtctgagctcaagagttcaagaccacccagggcaacatggtgaaaccccgtctctagtaaaaatacaaaaaaattaactgggtgtggtggtgcattcctgtagtcccagctacttgggatgctgaggcaggagaatcacttgagcccaagaggcaaagttgcagtgagccaagatcatgccactgcgctccagcttgggctacagagtgagactccatctcaaaaaaaaaaaaaaaaaaaaaaaaaaaactactacttatcaaggaatgttttgaatgctttaattctttgacttaaattactatatatatttataaaggtgtagaagatttaacaactggaatgtgtgtgtgcgcatgcacatatacacacatatgcacatatgtatatatgtgtatgtataacatatatatctataaataaaagttatttaccaaagcatcatatattttcattttcttttctttccttttgttagcattttcatttttcttgagtactgtttttattgaaatgcaccttgcactttagctatagagcttttccttgttgaacaatgtagttttcttgctcaacaactctgacatccaggtaaatggaaggaaaatggataggggagttgtgtgttcataatgccactttgccaccctgaaatctatgcagataatctacttggaaggctttgagccccagtggaatacagaaccatgtaagtatcctgcattgatttacagcacctgctacagctgcttggatcttggcaggcattttctctcctgccaaatgctgttgaaattgctgggctggtttagatggaggttatatttactggacatgtttataatcttcagagtgatctaagccatagagagctaatttcccaaagatcaatgactaagggaggatttcagaggttatcctctttatccgatttcctgtgtcctaatgagatggctgaaacctgtttggaatctttctgattaggaactcttgtgagagtcaataaagaatatgacattcataaatctaaataagaggcgacttggcagcctgtaggtgattcatgccacgagaagcctttcccctgcccccaacaggatgtgccatgggtggccaacctgagacaaggtcagacttgaaccaagagtcttgagaggacttggcctctcctggttaattcagaggactcttctggctattagaatgcgctgtgtatattttttacctgtcttgatttaattcaattcaattgccattcaattcaaacgaaatgtatttgttaaatgattattatgttttccaattaagaaggatgacacaaaaaaactatattggtatatggtaaggatcattatatagatctaaaaaagttttatcaaagatgatgataatcataatagctaatgtattttgagtagttactgtgtcaggcagtgtgctaagcacttcacacatgttatttaatcctaacaaattcatgaattaggtcttattatacctattttgcagatgaagaaactgtgacttagatgcattaattaactttccatgttaacaaaatccttcccaaatcccatattcccctctcgctgtcttttgccccctctcagctaatcttctaggaaaaacttgtctgcctttatcatctctacttctttacctcccatttgtttctcaacccattcagttaggcttctgccactgccatcaaaatgaaaattaaacagggtcatcaattcctccacatgtccaatacagtatttttgtttcactggattgctcaccaccttttcccacaattaaccacttccttctggaaacagtatcttctcttggtttcttgtaccacatattcctgtgtttcctctggaatcatgagctgcttatctccatttgatagcacctcttcctctgcctaatttctcattactggagcattttagtttcggttctgggtcatcttctcttgcccctggattctgccctgtgtaggggattttaaacattgttggtaccacgtacattattggcagtctcatgaagcctatagactcgaagtgcataaaataccctggatatctctcagtatcccaaacgtagttcttacaaatgggaactcttgttttccatctgcaaatttgtttttcctccagtcttgtccatcatcaatccagttgctcaagaaaactagaagtcatctatgattcctcatttatcctaaaacacaaagcttataccatccattagcatgtcttggctattttatcttcccaccgttccagattttcccactttttccttctatccactgccaccctgctgtcaccccttaggtggtgcttaatacatgtttagtgtatgaagaaaggtttggaatggggaaaataaagagacacactgaatcactaggggacatgtaatactctaggcaagacccaagatagaacagggacagtctgaactgaagacaagaaggatgaatttaaaagataagtgtgtccagtggaaaatacagacaaagaattaagagttacaaatgcctgttagtgtaatcgggttgtttgaagctatcttttaaaaatttccatttctttttaagtagccttttacctcatgttctgtgaagtcttttggagacagtaaatcatattgtttgggaaatttaagggtggagatgggaataaaactgaaaagaggaatctttcctagattaagttgacaaagaaacagctttcttcagccatttctctccagacactagtcaaacaaacaggtgagcaccagatagtttgagcagcagctggaacagttcaataagagtctccctctagcctctccttacttctgaataagccaagttaagctacagtcaactagtcggcttctctaatattctgtattgttctgaggtttaaggctttgtttttttcttggctgtctaggctctctgattaactgagattaatctctatcatcctgtgtaagctaaaccctaaattacataatatgttttctatctgtatgccatatgccttccatgtcagggatgactccagagacaacaaaagcaagctgtgtttttactgattttgcaaacttgcattcatcagccttgggcattttggcctccccagtgtcagtatggtgttttaatagctgagaaaaacaacagaaatataaagagaggacactgtgaaaatcactttccaaactgacttgtattgaaactgcctcacatctaagtaatggaaaataacagtgattaggataatgcggtgcattacattcggtgacagttaatcctcttattaacttcatggtcatatttcgctcatttgttaggttggaaggactgtgtgagaatattgtagttcctgtttttctgttcattgggaaagttgggaaaatagttctaaaaataaaagagttccaggttgaaaagcctttgaggttgactgttctctctggagatgcatgtttaccttgtgccctttatccatgctttgagtttgggtacccactctttgaggcctcattctcttccctttagaggattttctttccacctgagcaatcaccagtgagggaaaagtcagtggggtggttcagctgcatgatatgttgcattgacaaatggaggcagagccctgctccagccccgtgagttggaacaacctacaaagcatttctggcagtgagccaaagaggtgatccctcctctagggaaaaaaaaagtcaatggctgagattgcagttctccatccccttgctgggctgattcatacagcagcattgacactgaggtctcagaagaactgttctcttcccagtccatctaaaaatatctaaattcagatttataatgtcaggagctgataaatttgctgaggaaatgcaagcagtgtcactgccatgctaggaaatctattctgatgaattgatgagggaaagaaattccaaacatagcagagtctcagagtgccacttcccctgggatggtgagcaaaatgagcatgttttccttgccatcgaagttcccttcttcaaacatagtagaaagtagaatatactagattgaaaaggaatatggaaaatacctttttgatcaaaagcatgacatgacataaaactaaatcttatggcctgtaaaatattcttggtttacgtcaagcaaggggttcccttttaaaatgctctttcactaagacaaaaattccactcacatagccctggtgacttttgattgaatcaggatcttttaaatttggaactcagcaagaaaccgactgtcttactttcctacagcttttgtttgaactttcagaatctaagttgatattgcggtctgctgctaaccagctctttcctctctttagttggtcagtggattctcaggagtattataggatgtttcctccataccacctggcttgaaatgatttggcataggcttcaactctaatttattcagcatccctttagcgcctactagaaaccaagtatcatgactggaacttttctgaaatgatgaaggtgccatggggacagatgggcgtgtaaagaacttattacaaatcaaatcataacataataattgatactgaacaattgctatgagaattgaacagaggaaatgcttctgctgggaaaagaccaagaaggcttcagagaagaagcaaaatttgtggttggggtgatacaatgaatgagtactagcaatttctcaggggagcagagtatgtctaacaggcagaacagcatggcactaagttaggaaaagtaccacctgccttagggacttcaacaagatatttgaagtgtttaaataatttttttttctcacttggattttggcttttgccaaacaactaacaaacaactgttacatttgatctaattattttagatcattaactttgaaaattgctgtttgtgtgatttcctacattggccttgggcctattatgagctgacatctaatgaacaggtggctggtacattcctggagttttgcccttgtcaaacacttgacccagaccgcaaaatgtcatggtagctttccctgctgaaaccttgtggacttacagctcagtaacgatgttctaatgatctaacatgctatgccatcatttgttgattcataaagtcatgagataaacactaacattattatcactgtctctttgaatgaaaattaaaggctagacttttaattttatgcagtattttcctgactcaattatttgcattaaaaaatgtttaggcatttcattctcatggacctacctcttaatatgctttcttcttaatcaggcaataatttgtaggtttgggcctcaatttcaatagcaagtgagccccaaactcagtaaaaagcaaaaagggttttttttttctgagattcaataggaaacacagcatacaaatatttcatgtaattttaaaaggtaatttagcatagatatgcatactgaagtatttaggggaagtagaaagatgtctgcaatttattttgaaatgcgtcaacaaatatgacggatggatagagggatagataaatgggtggatatgtttgaaagcaaatataataaaaatgttaccatctgagtataaaatacagctattgattataaaattattttaactttgtggaatgtttgaaatttttacaatatgtttggggagaatgataaggtagcaaagaattaaactggtagaggtgcttggataagaatgataagatacttaaagtgaagagaaatttctctgacttatcaaaatgtagacacgaatgtagttgtgtctgtgagtcaaagtacacaatctctcttctccattagcttatgaatctgtcagatgagaaaaaagatcatcctaggagaaagagtagttcactgtaaaggccagaactttagtctacttggcaatatataaatagacttttggggtttatttttaatataaaacactgatatttttcgcaaataaggccatttctgccttctcagtcatttcaacatatattgagcacttcctatattcctggcatggtgctaagcacgggggctttaacttcaaaaagttgaacatcaagaatggagaaagagaacaagaaggtgatgtcgcacacggaaagaaggacttaaaatgtgctgtgagagctctgaagagggagaagtccctggcttgttagctctgatttggggcaggctactaaacctttttgtgccttagtattttcctctataaaatctggccaataataaatgttaaactactgtctgttaaatagctggaccttcataaatggtcactaatatctttaacccagagaggaagatcaaattaggaaaaaaaaataacacagccataaaatttgtttgacagacatccttctttttcccatccctcctctataccccatcttttgttgccctagtagaatgataaaatcacagccctggagctggaacagacctagccctagattttggacagatattccattccaacccccatttagaggtgaagacactgaaataacttgagaaaagtgacttgtctcaggtcccatagctagtcaatggcaaagtgggtgaacatgtaggataataaagcttttactggagagagaggttgaagaaaagttctttggaaatatagtttatgatttcttaggatgtaagagagaaaatgctcagaaactttttttattgttagaagagaatgtgttttagtgtacctaaacacattgcattagtaggttctcaagaggcatttgttgacttgtattgcattaaacctctcctgctaattgtctgtatagcatggttaacccttgttatgtgggtaactgttcctttaattaaattagtttttaagtcttttaattatattttggtgcctgtaattgacagaatctatatctcttaaccccacatagatttatgcagttaggggtagtgaagattgcttctctctttgtgaaaatggaatgagtactcttgtaacatctctatatttgtatcttatttgatctgtgggacatagaacattttcttgacaagatagcgatttcccctagagatctgtcaattcacaactttgaattaaggtctctaggcgttctaattatcagagccaatgacccccgctggctttgacctccaatactttagctggacagttcactcagagcaaagatagaggttctttatactaaaggagaatatttcttatcacagaggagggaaagaaggagaataagagaaatagagggagtggaggggatgagagaagggaaagagaaagagagtaagtgagatgtcactgcaaaatgtttttaaattatttagttgatactattaggttggtgtaaaaatagttgtgcttttttccattaaatagtaatggcattattaaaattggcattattaaaagtaatggcaaaacggcaattacttttgcaccaacctaatattaaatttttaaaaaataaaagtcatataagagactaagcaaatccacaataaaataaataagttgaaaattagtgaatgaaataggatctccacaaacaatgctgcagaatagtttagaaacactgaaagatatttctaacatgcaatacagatcctttcatgcttcatttgagaagctggtataaatagaaaagtgaatgtacagtttcagaatctcagaccagaaaacattctagagcacaagttctaagacaaaagaaagagaggactcacactctacttgggaatgggctgatttttgctccattgagcagattgcactgttgatcaacaaggtagatctggtaagaagttgagacagagacaccacatgctgaagaatctaggctgtcggtgctttttggaatctcagaaagaggtcagggagcccttgtgactccaggaggtaaatgactttcccattgtttgctgttccttcccagcctcaaaaagtagggatgcagacagctgcttctgagggtgattttttttaaatttaaaagttccacctgggcatgatgcagttgctcatggctgtaatcccagcactttgggaggctgaagcacatggatccttgagcccaggagttcgagaccatcctgggcaacatagtgagaccctgtccctacttcaaaaaaaagaaaaaatcagcctggcatggtagtgtctgcctgtagtcccagctaccagggaggctgaggtgtaaggaccactttaatctgggagatcaaggctgcagtgagccatgatcatagcactccactccatcccaggttacagagtgagaacctgtctcaaaaaaaaaaaaacaaaaaaacaaaaaaacaaaaaacaaaccttggaaaagtctatagcttcatcttatgcattattcccccatatactgataaaattcaagtcccttcatagaacccaaacagctgataatgtggcccataattgtgaattccccaagcccagcatttgaaaagacaatttaaaaaatgagagagaaagagagtcagtgctgataagtatgaggtaatgtgaatgtgtaggcacagggtgactttgtaagtgggaagaaaaggagggagaagctaactttcattaagagtcttctaggttgggtgcggtaaatcacagcactttgggaggctgaggtgggcagatcacaaggtcaggagatcgagaccatcccggctaacatggtgaaaccccatctctactaaaaaaatacaaaaaaattagccaggcattgtggcgggtgcccccctgtagtcccagctactcgagaagctgaggcacgggaatggtgtgaacccaggaggcggagcttgcagtgagccgagatcgtgccactgcactccagtctgggcgataaagcgagactccgtctcaaaaaaaaaaagtattctgtgagccaagcgctctacttgattacttgatttaatcctcgcaaatatttttcatataacatgatgagaagatgggggttcttgtaagcagcagaactgggatttgaacccaaatctctatgacataggtccccatacattttctatgacattggttgtgtgccatctggctcatgactttccagcaatttcatggataaaagatgtataataatctgacattcaaaacccatatacttttgcctgtgttagctgctctgggtaaaactattggataaatgaggtttggagaatagatgtgaattttcattattcattcccttctgagaattgtccaaataatattatttctaccagggtgaaatagagggggaaaaaaaacccctaggtttctggaaatattgactatgggatataaggcaaatttagatgttaaaagtgatagttgccaaatttgtcaaatgccgtaatgttctcatgtacaaaaaaagttggggaatttttgtcagaaaattatgagttttgcactggccaattcaaatcaaagagtttttttttttttcttgtctttggcaggttttacaagggggtgtccctgaggggaggtgaaatgagacctagaagcaatttttactgtaacacacacatacccatgcactaacttgctttcatatagttacctgtacatgccacatttcatgattaaaatgcagtccagaaaaatatggtgcactgggctatgtatgagtcccattctctttctttctatttttaagtggattttatgttgcctatttagtctgtaatgaccataagccactccagccaacttgttttaaagctcagagagaagtaggtcactaaacaatagaataataatgtggccacatatttaactttctagtacccacatttccaaaaagtaatttcatccaaaactatcatttcaacatgtcattaatgtaaaacactgttaatgagatattttgaattttttagtggtaggtcttcaaaatctggtgtaaatttgcactgacagcccatcacaattcagtcaagcccacatttcaagtgctcagtaaacacatttgtctagtggctcctgtattggatgacacaggtgtagactaggaaagcattcactcatggtgtttattcaatattttctctatcttctatcatttcttatattaagttgtagagagagagcgcactatttctaccccatcagagaacatgaagggatgcagagaagaatatgttgagttgactacctacctcacagaggacctctgcatgacatttagttgaagggaactgccttctctttttccaggaagattaaatctgtatcctctctgccattcagtttaatacctatgtgcaaggcatcagtagagaccagatagatagatagatagatagatagatagatagatagacagacagatagataggcagagatgtttgtgtgtgtgtttgtgtgtgtgttgtgtgtttgtatctctaagtacatgaagaattggcatacatcccagaacacaacagactgaaactcctgattaaagataacaggtaaatggaatgaacatccaataaaaacctgtttgtgtttttaaacaaaattaaaagactaaaataagaatagaatataggaataggaagaaagccttacatgacaataatcaatttgggtaccattttgttacctcctggccttctgcaacttaaagggaaaaaaaaattaccaccatcaggcaaatgccttatcatgataggacaaaattcttcccattgtgtggctctgttggcatttttaaatgtgtcatatgtggctgggttgtggggtacaagatgtagacttgcttaggagacaaagaccagcataaacttttgaggatccatcctacatggagaatgtagtgaatatgctattgctctaagtggagacagagtcttgcatggcaggaagcttcctaaggtgaccacttgagtcatgaggcttagaagtctttgcagaagagggaaatgagccttcacattaggaaaatatgctttactattacataagttctgggatcaactgatacaaaagttgggagaaatcaaaattttaagtttttcctatgtgtgtacctatgatacaatcaagtttttattcaatttataactcctgaattcattcatcaggagtcctttaggaagctaaacagaactggcaggtctgtcatttggatttgtcatgattgtgagtatttcgttccctgcaattaaaaacgtctgtgggacaacaggatttcaagtcaggagattgttgggtccttgcttctgctacttagctaatctgtgactttggaaatcactctctgaatgtcattttgtttacatctattaaatgtaagctctctctgatagcattatgatgaggaaaaaatgaaagcatgtgtctgaagtatctggtacagaggccagcacatactggttgctcaataaataccagtttctttcccttttactactctaacaatttctcgtttgtattttctgctcctgagctctgtgtcttgaaaagttctgttggcatacacattggacttgattgcttacattaaaattatctattcttgtctctattttgtattaatgaatacaattaatctgattacaagtataaaactatcagtcaggtttctaaaaagttattaaaacatatatgtattacctgcttcccacattccagtgccaggctctgtagaaacaataatgaataatacagctattgccctaaagaggcttcaccaatcctgtctgtggttcagcatcaccaggcaataccaatttgtcatcatcatgctgaatggggagaggtttagaataatcacaggagaacgtaagaccagctcctggccccgtcttgatgggtcatgaaagaacaccgggtactatcctgagttgaaataattctagctcatagttaatctataaagccttatccagagaaattggagattatctttaagcattttgaaatattaagcatagcctgctggccccaaatgacattttttttaatatttacaaattattaataaaactaaaaatttccatcccttccctggaaccccaagcaaccaccgattatttatttatttattatttatttatttatttatttatttatttatttatttatttattatagagatggagtctcactatgctgcccaggccggtcttgaagtcctggccccaagtgatccctccgcctcagcctcccaaaatgctgaggccacaggcacggatgcagagtttgcagatgggcagctaccattttcgagtatgcagtaactgagttttgtgagaagagcaaagtggaaagggagaatgacttaattaggtctgtcctttagaaacaggtctgcaaaggcagtgttgcaaactaatccaagtgaaaaatcatgggagacttaaatgaaagcattcctgggaatgaagaaggcagatttagtaggattactaatgacaggttggatggaagatacaaaagagaagaaatctatattgctgtgatccattaagtctcattgtctacttttaacacttaatggggtggcagtgttgttattctaggctatcctttatgaggttggggttcttccctgacagttgctgaggctgtgggaacaaacgagttcatatagggagtgagtgaggagggagacttcagacgctcagggattctacaccatggaggaggctatgaaggagatccattttcttctaaatcattctgataggcttctggatggctttcggtctctggccaggtgctgatggaaagctctcctctctgatgaagattaatcatcaaacccaggagataattttattctgctcttctgagtcatgttagattccagaacaattaactttattttccccaaatcttgtatctcttgggaatcttccagtaactttggtttccagtctacggagctacttttggcagcttgttgtcaaagaagtgataattcttaaagcttagagtgctaaactgcaactcagttgagaattgaaacctttccagtaaggggctcagccccagacacctgggactcctctttctcctttcaccctcaggtacaggagtgttacataaaatggcactaatccacttttacagtttttgtgttattaagcaatacattaagatttaataaccataacaaaagggttgttttctcaccaagcagttattatttgttgtacttctatttctactcatttaccttaggtttgctttagcgatttcaatttagtaggtgtctaatgatatgcctgtcaatgaaactttagagatgactttcagtccttggaatttttttttcatagtttcaagaagcaagacttgcgaagatgatttgcgttaagaggtttgtgtgagttgagtgtggacttaaattaaaagtaacttaatttactcagagtagtagaatctagtgcatttaaattggttgagaggtgcagacttcgctttggaagtcactgtaaatcgatgccgatagagtaaaaagcattctctgttctcttgctgttcctttttgaagggttcagaaggttggaagagcatccaaatcagtataatcagacctattagatcctagcaaagaattttaaatacatacatctttttgcatattgattctggcaatttaaccctcagcttaaaagcagaaagttggttcaagtgaatacaacatctcactctgcacaatattaagaaatagatctactgaaactaataaaagaattccattgttgtctcctccatttaaaaaaattctacctgaaatacttgttagaatttttataaaagtagtatctcatttatgtacaaaatagtttgtgtaaactataagtagacaaagatgtagggttgtatcacttctttgataagatactgatcttgtatttttaaccaatgctaggcttaataaaagggtcctgtaaaatttactatgaaatctgtatgcctccctccaacttcttttccaactgagattggagtatggcaaaggaaatgaagcatgaagggaaaactaggagctatgataatctaagattcataaacaattataacattatttgctcacttttgattgtgcaaatgactaaatcttttaatgaagcataatgacccatctgacacatatataacaacacataataaaagataaaattaaatttgtcaaagcaatatagaccacccactactagtagattatgtttgggtttggattttcatatattttatccatatctgtttccttctattgggactttatggaggcattactcatgaactttggcagatcttttttggtgtgtctgaaagaaaatcccaaagctggttactaagatgtttgaaagtcatattcttcttcaaaccgtgtagaaataactatcaggaaataagtggttataattttaaaatggcatgtttagggaagagaatatataagtttgaaaaaccgcagtctcctccaatacatttctacctattactaacagggtcaaaattgtctacagaaaacaacctgatctcaatttcctcagacaattcagctagtaaaatggtgtgactgacctagagttacggagataactcctactgctgagctctctcaacaagtgacaccctggttgacaaacaatcacacattatttattaaacttctatttaataacaggagttatggagttagcaatgttaagtgaagagtccttgttttcaaactttgcaaattacagttagtaactaataaactaattaatgtcctttatgaagagatgctcagtgatggcctgaaaaatccctaaaggagatagggagagaattgaagtatggaataaaatgacctatatgggaccttcaaacttggagttttctatattttcaaaaattacttttgctgtcatttaatgtccaaatccaatcccttgtctagggaaccagttcggattaaacaaaatttcaaaaatacacaagcaatcaatatctaattcatttaagtcctgtttcttcccaggactgctgggtataagcctagagttgcctgccatttctcttatattcaaacactttgggaaaggagccatttttttagatctattttctccctgaagcttgggagctatatctatataaaatgagatgacatactagggctagcgtactaaaaccttttctaagagaatcaatatagctttgagaagcctcatttatatttaaaggagaaaagagacataagtagaagtggacataacgtatcatgtagacattgaaaaataccagaaatgatttaaaagtgactgcgtgttctcatattcccagtgccttgtaatttgacttggagggatgttctagatctccattgaatgtgctcactgagatttgtctttgtcgtattgattacaatcatctgtcaatgccctcaatattttctgtactgaccaacagcgacacagatcataggctgtaactagtacaggctgtgccaatgaaacaatagggctaattagcagacatgaaaatgaatcactgatttaattttcctcctggtctaatcaacacaatgtgtcagctaaatattttgatccattatttcaagtgaatagaatgtgcttttatattatcatttcaatttcattaccttgaatattggaatttttgatttttggatacatcagtgtccagtcagtatccagtgatttttagatacattttggatacatcagccttagcatacatcagtgcctacgggtataaggcactgatatgttaataaacatattaacagtttgtaagccaatgaaacctataattattgcataatttaaattaacttgtgtacaaaatgccataatatttccacatacgtggtggctttcaaaatcaaaataaggtgagcctatttcaatttatgacagacaattgtatatctcctctcttttctttgccaaagaagccctttatttcatcctcacaggtgttatacttgtctcctttctgcttggtgaaacaatcacggtttgtaatttcactttctgaccatcaaatacgataaaatgaaacagtttgtgcttttcttgtactttccgctctcaggggttactggttgagagagctcagcagtaggagttatctccgtaactctaggtcagtcatgccattttaataggtgaattgtctgaggaaattgagatcaggctgttttctgtaggcaagtttgatcctgttggtaacaggtagaaaatgtattggaggagactgaggtttttcaaacctacatattctcttccctaaacatgccactggctggctgggatgctaccttataaatgtgaggtagatgacaccagtctgtaactctagacttctgtcatggatagcaggataacttagactgagagctgtctgtcttcccagcccacatggccacaggatcagagcaggtcatggtgaagcagaggagaaacagctgcaaagcagagaagaaagtccaatagggtaggatgtgatgaataatgttgtgaaacagacagctagtgccagtaaggctcctatatcatagaagtctaggaagatacaagcaagtgctgtcatagacagataaatgaagtggacattgttttgagacaaaagcaagctggcaatatcagagaagcttactataaagagcaaaatgctgggtgcactggctcatgcctgtaattccagcagtttgggaggccaaggcaggaagattacttgagctcaggagttctagaccagcctggtgagacctttatctctacaaaaataaaattaaaaactacctgggcatgatggtgcaggcctgtagtcccagctacttgggaggctgaggcaggaggatcgattgagcctgggaggtctaggctgcagtgagccatgacagcaccactgagccttggtgacagagcaagaccctgtatcaaaaacaataacaaaacacagcaaggaccctattactctcaatgggaaaaatcgcagttgcttttgggccagcctaataataacttgacagagagaattttattccctgcaagctacgagttcgttttctttaacagatgaggtaactgagccacataaaaattaagttacttgtctagagacacccagctgataagtaagagagcagacatttctactcaagcaatctgactccaaagctcatggtgatgaagcaggtcatgaaagctctctttatgacacatttgaataaagcagcatgacagtgggacaaaaagtacacaagacaaaagctccatcgttagggccaaagcataggaacaaactcaggccagtgatggagcaacttcagctgagattttagccaagagcttgttaacatctttccagttcccagatagaattagtcctaaggaattacgaacattgtattccatggcatatatatatatactacattttctttatcctctaatcaactggtgatggacactgaggttggtttcatatacaagagcagatgtcttttatttttttttttttgagacagagtctcactctgtcacccaggctgaagtgcagtggtgtgatctcagctcacggcaatgtctgcctcctaggttcaagcgattctcctgcctcagcttcctgaatagctgggattacaggtgcacaccaccatacccaggtaatttttgtattttcagtagagatggagtttcaccatgttggccaggctggtcttgaattcccaacctcatgtgatccacccgccttggcctctcaaagtgctgggattacaggtgtgagccactgcacccagccagatgtcttttttaatatgatgatttattttcttttggataaatacccagtagtggtattgctaggtcaatggtagctctatttttagttccttgagatatcttcatactgttttctatacgggttgaaccaatccatattcccaacagtgtataaatgttctcttttctccacatcaacatctgttgttttttgactttttaataatagctattctgactggtataagaggtatctcatgtggctttaaattgcatttccatgaaaaagaatgaaatcacgtcctttgcagcaacatggatggagctgggaaccattatcctatgtgaaataattaagaagcagaaaatcaaatatctcatgtattcatttataagtgggagctaaacaatgagcacatatgcacataaagatggaaataatagatactggagacaacaaaaatggggagagagagaaagctgaggattgaaagatgatctattggataaaatcttaattatttgagtgtatacggagagcccaatcttcaccattacacaatacacccatgtaacaaacatgcacatgtactccctgaaactaaaaaaaaaagaaacaagcattgtgaactgctggatccccaagaaaggcagatgaccataactaggaagaaaaggagaaaaaatgtgcaatgtcaagaaacatttttgtaacttatggtcaatcttgtgtttctgcaacacctatatcttaccatgtagaaatttagggatacaaaccacaaagattctgagggcctaatcatctctcctagacttgcttttgcattctggagtaataatctggaaaagcaataagagtagggacatatttatgattattcttaaaactgtgtgtagaaaaatacaagaatatctactccaaaaacctgcatgaagacatttgatagttagccaaaattcaagagactcctaatctttgaaagctacacattaggctggtgtatatgtcccattatttgaaattgcacctttaaatatttgagacatttatcctattatccctgattacaatttccccactacaattcactgcacagtgcttccttagggagctgcttaatacatttcaatcttagaaggtcaagattccctcagccaattccaaactgcattgtcccattgaatagatgtggcacattctggatctagtgagaataacctatgtatattactttgaagtaatacaggtaggccattatagcagaaagaagttgagtaaatgttgatatttaagaaggttgataaaatatttgaacacaactgcaatccatacccaattctcagtggttttttttatagaccatgaaatcatagctaaagtcaacttcggttctgccctaacggagagccacaaataaccctaaaccatagataactcaaatgcatttttacttggcttttgactgctttttatgataattttcacagcacattgctcttctaattatgttttgtttgggatcatattaaaattaacttgtatttagtgattatgtgctacctgatgagttaaagaggagccctgggagtgtattgaaaaaccaggctgtggatggccttcagtactttacacaaagaaaagccaaatagttaaaaaggcattaaaaatggaaaggatgtaactagtgggcaaatagctccaggacctcagttgcatgaacttagtatatctctttcctcctccttctcccctccctcctccacgccctctttctcctagtctctatttccccttttccttatcctcttcctccatcttttttattctttcttggaggcatggaaagcaactcaaaagaaaaggagacctctatagtacatccgcactcagccttggatagtgagaagtactcaggtctgagtagcctcagacagtggagtcagaagcaagatgaactgtcagggattataataggaatggtcagggctgaaagcaaggcaataggtcaaaacctggcaacaaggaaagagccctggataagtagtttccataaatccaagcaagacaatttgttaaggcttagcatgcaatcaggcatccaaaattccatgaaaaccagaaggcagggtgaggaaggaacaggaaccaggcagcagttctgtgcagtggcaccaagtgacagcaagaaggcagcagtactaccaaggcaagattacacccagccaaaaaaccaccagtctgcagggcagccaattgatactccaggcagagccattcagagctgaagagaaagcactaaaaaaaagtgcagccacttctgtgattaaagacaatgcccatggtactaaagtaccgtcttggagacactggtcatagttgttaaagcttccagccctcccagagaacatctctatgaaaaaaatactggtacagcagccccaggcccaccttctggaggttcagcttttaattttagttgtttcaagtgctgtggaaaagactagacctgatccctcagttcttcatattgccttatgaacactggccagaagggaagcacatccctcccttttgttaatttcctccaatattgctaagacaaggaatttcaaaatgttcaacaaatattaagaaacaaaaaagaaatgaataaagaaaataagatgggcaaaaataagtatgcatgcaaaaataagtatgcatgaaacataagttttcaaatatcatacactgacattgattaatcatcactagctgtcaggagagagtgctgtattgagaaggatttagcaacccagaatgtcctaactggcttggctcatgtctgctgtgggtaaaggaaaagcagggagtgctgacaagtctgctttgtatttgccaccctttgcaaataggtactcaccctattcccaaagagctaatataaattacatatcactttatttgtgtttgatttattacataattattattagaataattcacataattataaccagaagccccaaaagagcagagaccctgactgatttgttccatggatacctccagcatctagaacaggacatgacatatagtaccccttcaaccagtagttgcctgacttttctgccctcatttaatggatcctgtctctgaacctgcaggcatcatcatatactatcgtaagtgatttccttagcttcctaaacccagaaagaatccacattctatttctcatggtttttttctatctgtatagcagcatcaaagtgggccctggtttttagtttgagggatatgccacttctgcaaccagctggcataaatgtggcaattgacacgataagagaagctgttctcccagccagggaagaggcattaccaattacaggcctatactataactgtgcctttaacatcacttgcatgtaagaatgcaggtctctatgttagaagagtgatatctgctcacagcatctcatctcctcctcagctctcccagcatttgagcgctctctccgcttcgttttcaaccatggtagtctaatcactggcaaaccaccagtgagttgattgcagccctttataattcctgtgtagtgagatgccataatgacttttccaggagtttccacatcatctgtttactccatgtgacattccttccatctgtctactttcagtttattttactttattttttagtaacttcatatcgcagatgaaagtactgtgaagtttcttctcaaaaccataatatttttgttacgttgcatgataacctcaggaaacatgaaattctaagaatttaatactaatatcattttgggatcattttttaaagcagtaaaagactttatgttcatgttgtctcacttttcagaggaattcatagctttttattgatgtaagccatttcataaccctgtcaaggtgctttgaggaagaagttaactgattgaacatcaacaaatcctggaatgtttgatactaatgatctcagaaggggccctgcctgatctacattccacctgagcactccttaccaaatattgctcttgccttcctctgcagtgattggttctgatcactgtagagaaagcatggaagctcattttacaaggctgcatgtgtgtctggctgctacctagatgcatgtccttcttgcacaggtcaatccattctctggtttttctctcctttgctctactcccttacacagaaacctaatttacctgtttctttcttaagctcttcatttcagaaaaactcaataaggaaaattaaaaaacccctcctttaggatgtctctcttatttctgccagctttttgaagtatgtgtgctctgggcaggggtggggacaggaagtgtatgtgacaaagatcagtcagacaaaacactcctggcatgatttccattttagagttgtgaaactgaagaatgggcaggtaaactgatattttctataagttgtgagaccatgattcactgatttgtttaccttaatgaagcatacgtaaaataattgataaattattttatcaataatttggtaatttcctcttggggctaattgaatatagtgagtataattgagtatacggtgggtggctttcaagcgtatctttccaactttcactattttagtaccctggctagaaaatgataatctgatagtgaaaatattaattcatcctctacaaggttctgaagatactaacttctcagtaaattcagatatagattacaaccattttcaggatataataaagaaggactaaaggtatctctttggtatgtggttctttacggccacataaatggcttccaagtcttcatttccttaagttcatttcctgctaccctatggacattgctaccctctccttctctgggttacaaataaatggttgatggcattttaataacaaagattaaccaggttgccatgttaaggatagatgggagaagcagtttgggaaggtagcctagacaaggtgatggtcttttcaggaagttctcaggtgtctacaataggtagcagaattgggcctgagcaaaagtcacatgagcttacagcaccctgtgcagtcaaactctcaacttcacttaagctttttctttgctttgcttctgcccactcacctggcctgttaccacccactgttttaagcagctcttcagctgcacatctactgtcctgctctgccctgaaataggatgataggtaggactgctgtacccacagtttacatgtccttaccctccatgtaaactgtgggtacagcatttgctacctaccgtgcttctcaaataccggaagcatggtttggacagctgaaggcttagcaatcattccaagctgcagcatctccttgggcctcaggctaacacccatatcaaaacaacttgcgcggtggcgggcgcctgtagtcccagctactcgggaggctgaggcaggagaatggcgtgaacccgggaggcggagcttgcagtgagccgagatggcaccaatgcactccagcctgggcaacagagtgagactccgtcccaaaagaaaaaaaaaaaattatgatatttaaagagcatatttaaccattaaaatagtaaatatgttgctttttttttttcttaattgaactgtagtgtccttattgttttaagacttcatcgtatattctggatacaattcctttatcatatatgtgatctgtatgcattttttccaagtctggcttttcattgtctcaactgtgtctttcaaagagcaaaaattcttaattttgatgaagtctgacttatcagttttctttttagtcaattttgcttttgctgtagtagctaggaaatctttgcctaacacagtcataaatattttcattttttacattttgtgtttaggtctcccgtgcattttaagttaatatttttacatggtgcaaggtgtatggattaaggtttgagaacagacagacaggaatgtctttcagatttataaaacgtaaatgctatatagttaagcatttaataatcttttctgaaaaggaaaaaaaaatgcctacatttgaaaccattctggaaaatgtaagataatgtggttttcctaaccaacagtagtcagcttttaaatgcagtactttgactttattatcttatcattgagattcaccatgtttttatgtaccactaagaaagaaaaagaaaaaaactgattaaattgtttaaaaaaaaacaaaaaccttgaagacaattttagttacctccaggctaatcatttcctttttcttttctttcatcgcccctgaaactcccccaagcattatccaaggtgtgggctctttttggttagtaaacttcacttgtcatctcctttgagtgtgcttccccactctcgtcatcttctgctggcttaactcgaagcccaaatttcttacttgtagatggttaacaaatattccacattctctgcattttcttcctgcatttggaacctgggtttcctttaaggacaccaactccttgaagtcacactccccctttctcgcacgcatacacacatgctcagacaatgagggtggctatctggcagcttccacctttcccactagagttttcaaatatttgccacactatgccagtgccaaaatttatataataatctatccttcagaggcttctccccttgagctgctcacaatttacccctccttctaactcacaaggagttacaaggccctggaaatgtgcctccctcgacagccacaagtgaaatagtcaccaggttcatggtcttactcgaatccctgtcatgcagggatttcttcatttgcttggaatgactcatcaaacagcctagctttacagttccttgacctcggctcttcccaggacttttatctccatatgtcgacaggaatctactttcttggcacttgttactaactggaactgtatctattatcctttctcaacaagaacctctcatatctcagcatccttctaaggctcgcttactatttcacctcttctgtacttctaactttgagccttttattcccttcctatttgcaagcttcctaggcttcatttttaggaccccaatgttgatcacttgaatttccctttcaccagctcactgactctcttggcctttcaactcatcctttttacaaacccctggagcaggtctctcatcgcccttcaccactcctgcagccagtcagaacagctggtcaaatgaatacaggaatggactcactcattcataccaacggtgttcacttgacctgccataacagtgtgattctacaggccctgcaagttcatgctgactgtatatctcactcttctgcctcagagctagagaaaacaacactgaaaatgaccaaacctcctaatcaggaactggtaaattaaactgtttaaaaaagttctctttatatgtgtacatacataatatataacttcacagaagtgagcaaaagtgattacactgtatgtataaatttatggggagaaatgtagcatctgaattcttttcctttttggtttagtttccagttcccctcttcccattctccacaccaacatcatccctcacctcataaacctacacctagaaaaactatgtcaataatctagaatgtatctgggattttttcccaagttcatatgcttaaaaatatatacacactcatacatataccatcatatacttataaacacacaagcatactgtggatatacaggcttttgggctttgttttaaaagatgagatcataatatacacatcttctgtttcttgcttttgtcattagatatcttgtagatatcactctagatgaaaaggttctaactatttttagatctaattattaacttgttcctttgtataaactcgtaaatatttattgagcacctaccatatgccacactgaagcctgggatttattcaaatttcagaattgagaagggagtagagagattcatagtccagctctcttacagaatagatggaaaatcaaggctccgtaaatattcgtgatttattcaaagtcatgcagccagttgatgccatgtctcaaatcaaaatctagctcttgctagcccccaagtccagtcctcttttaatcatactattcagagtcccataaattagcatacaattacttacaatttaatgtgaaaacatactacaacataagataaatcttcaggcctggagtagggagaggatagggaggggcaaggattcaggaaatttcctgataatggtttgttgtctgtgtggatagaccaaattgtctttaatgaaccaaatttatcaaccagtgaagactcattaagatgcccagcatttaaagggagatcaataaaagagagaacttagtattgaaaagctatgaaagagctttgaatgaaattcactctccgtcttagcagagcgcttttcaagagtgagaatcatgggtgggctgtgagggaagatattccctggccatctaagcacatctggaaaggtccagatttcaaactgtcgctcttttgtcagtgctgaaaaacttaaccttgagcgctaggaagatgttctccaagatgctgaaacttgtcacgttatatgagtcttcatgttcataggcaaaacaaaacaaaacaacaggcatatacatgacattaccttcttttttgtttgagacagggactcgctgtgtcacccaggctggtgtgccatgatcctatcatggttcatttctgcctccaactcctgggctcaagtggtcctcccacctcagcctcccaagtagctggaactacaggtgcactaccctgcctggctaatttttttctttaaattttctgtagagatagtatttacctatgttgcccaagctgatctcagactcctggcctcaagtgatcctcctcccacctggtatgaagcactgtgcctggccttgaatttcttaatgatgtttttgtgaatctatttgtcaagagtacaactgccagatttttgtgcatttgtgcccctctgctccgaagtaccctgactgtcagtctattcattcagtcatcaaataactttggggcatctattctatgccaggcactactatggtaggccttcaataaagggaggctatgtttacatgggccttccacttcacaggcaagaaccgcactactgaatctcccgtgtctttgtccctccagataatttagtgtgcaccttatgaccttcactgacaaaatagcgaagaatgaacaaatgttccttaaagccagctaattctttggttattttaaagctgattggatcttttgtacacattctaaagactctaaagagagtccttgaaggcataatttcactgaaagacatgcaccacaaaccccctgagacatccaactgcagggaacacctcagctcagtcagtatgtgatgagctttcatgtcgcagggcacctgacagttggatgaaaaattgctttcagtctatgctgggttttctgtggcagttcagaagcaggactaggttctgggtctttactgtgtatgtcatcttttctttcagggttctgtgtttccatgcaaataattataatagtgtagaattatttgatacctactaagtgtcagatttcctgccatgtacttcacagacttttattctgtacaacaacattatgagtcatgtaatatcatccccacttcagaaagaaggttcggagaggtggggtaagttacacaatgacagaactacaagaggcagagcaggggtgaagctcagatccccgtgtctccaaacccaaggctgagaccgctggctgcactaccccacacagttctgaggcagaagagaatcaggaggtgaggatgggaactggggaaggggttatgttctgatgagttagtttttaaaggagagccagattttctgaagcagaattttaaacatgaataggacatgttaacttgatgttagtgaaatatttcctagagttggggtttattgttgaatactaaactcatgggagtactgcataccactgtggaaaggtgaacagaatgactttagggaatgtgacagtttacaaagaaaaaagtaaagaaaggaaggaaaactagaattctcagtcctgaccaaaactatctctaggataattatggtttatctaaaacttgtttctctgggtaatcagataaccctgctctctgtgagtgtagacttctccacatgctgtatgaggatacctctgtgtccctgtagttaacaattttaattataggtgaagtattcaggttaagtggcctaaattgacactttacatggagaaaaaagtctctcatgagactatatgctataaatacataattattcatatttaaactcaacattctattgcttttatatttgttttatattcatttttcacaaagtttcctttgcaattgattcctgggtgatggtattaacatgtcagtattatttattcaagacaagtggaaaatctcaagaaaaggctaaaagacccttgggagcttacctagtgactacaacagaactaggaattaaatggctgtaaagtgacatgttgtatacaacacaacataatttattatgtgttgcattaatataggcgttttgaggatatcaacattagctgaggaatcctgatgtctgccaattaccattgtttggtaaaagattgggagttctggatttaactgcttggtaatgaaatcaacggtttgcttcaagttaatgttatacagtagatgcctagctgatttcttgtttcccctactatctaccttaaacgcattctgggtctcccttcatctttgtaggtttctgagctatttttgtactgtctacatatcttgattagctaatctgtatattaaccatatgttctgacaagagttcagtgacatggaccctcagcccatgacgctcactaccactgacatgttgcatgtgagtggtggggggagatgaaattagtttattataatatgacttttgagaagatatagcaaaataatcctctaatccattctacagaaaaccttttgtttttccaactttattacctttcattattccatctcagctgttttcactttgtgagattgctagggtcaatgggtgaggatctgccatgggtgtgtgtgtgtgtgtgtgtgtgtgtgtgtgtgtgtatgtgtgtgtgtacttttcactgtcaattattctaagaaaagcaaatgctaaagtgaagtgaaacagacaatggttcacagtaaatatcaagctgtgtttgtattgctgccatctctttgggagaatttcttatctgttcctacagaaaaattactggaaatatatatcaatgaaaacgtataaatgaaatcctgaaactatataagattcatatctcttgattatccaaaatagagacatattattacttatgaagatgaaatgtttgtggtttgatgctaaaacatttagtactaataattattccatatagagtgtttgcattaatctcgactacactaattcagagcatgagctctttgcctttgtgcatgaagacagtttcttgggcaaattaccaatgtaatttcctcgttgtcattccgcaaaccatctatgttcaaatattttaaaagcagctgtacagaaccaaataatttatattttaattctatataaatcaacatatacttctttacttggacattaccattttaacttcaaattcaacatgtctattttgaaacccttgatttccaggataaatcagtctcttgctgacttcccttctcttttgtttgtggtagaatgattcccctaatgttggagccttaaagtctaacttagtgactcctctcatgttttccatatctagtctggggcaacatccagaaattcttcctgttctgtttttcaactatctttttagttttatttctagtgccgccatctcagacctctactaattcattggaattatttttcatctctctgtctaccatttttttcttcttccaattcatcctatgcatcaatgtcactctattttttcatatctgcaaaccactcagtggacatccaatatacaagcaaaccaattataggtgaaatttaaaaatatttattgtaatttataaaagaatagtaaactaaaaatgaatggtaataacagcaattataataatggaaaacaactatgatgctaattaggaggaggaagaatgttttcaaagtctttcaccaggtatcgatattcatctcaaagagtttgaacaacagattcaattctgtgtagggaccatttcttcatttattctttattcctactaaatcagaaataccaaattcataagtcatttggaagggtaacaaatgtttgatggtttgtcaactagtcttgacaaacggattctacaatgtacagaaattatggagacagttttcactgatagatgttcagtgcctcaaaggaaactcattaagatgagggaatgccctctcaaatgtaacaggattgttgaatatatcaacacaaaagatcactagcaaatggattcctaatgaattcctggttgaatttgcctctgataattatgtattcatattcagtttgagcattcagatgtgttaaatatggccaataatagcactgatttatttcctcctttaatttagaatatctttaagtagttagaaggaaacccttgttaactaatccattgacatcaaaatttaactttttaaggaacttttgctgtctctcactaaatattagaaatgatgatatgttgttcatgaagtcataaagtcaggcttctccactctctgtttgatttttatgtgtatgtgctgctcataaaaatcatcacactggtagagattcttgttctcacaatgcagattcacagtgtattttctccctgaaaacttgttattttctttggaacctttatgccaaatgatatataatttgcagtactattttcatgtctttctacttttacatctccgatggattaatgttgcagcattaattcattttgtgtgagttggtactctaaaatacaataaggcagacagctttaaacccatgtgatgtttaatatcctacaaagaccaaagagtcatagtggatatttccctcaatctaaaaataagggaaaatactaataagcaaattatataaaaatgaatctgcttaaatagacagcaccctgtttgccagatgttacctgagacaaccaatccatatatcccatgtatgtgagatgtttaaaaatgtaagaattactaaggacatgataaatttttatgagaatcataattaatcatatagttcaaatttcatggtgcctgtctattgccaacccctagtttttcacaggtttcacattggaaagcaatgggttgtcctttggcttattttattttagtaattaactgtcctttaaaaacaataaaactttcagccttcagtgactttgataacctatgtgataaagtcagaactcattagcctgatattcaaggtcttcccagagaggctccatcttacctgctctgacttctgtcttatacctgctgatccacctggggtgtctgctgaaagcaggtcagcacaatgactcagattcttccctttctttccctctcccatgccccaggatttgtttgtacaactggcccaggaatcctgacttcatttattctctatgggttaacccaggttcttgcttgtgaatggaaacaggataatggagctaaacctaaatggcattttctaaccatgtcttcattattcattctctgaaccatcctctctaatcagtttttactgatttcttccccaaatatgcatttgctttctcatttcaacttatatttacactgttctattcatcagaaatgtccctgtcttgtctgcctcgtcaaattcttcaactcccaactcctgtcttacttcctatataaaatcttattaggttaccttagctgaactatcttcttctttctggaattcctattgcaattacttttgttgtaattatttaggcagtggtttctttgatatcatttactgtgttttctggcaattgcactgaaattgtatactgctcttcaattaatgattatctatttccccaaactagattttaagcaccttgaggacaaatattgcctcatatgcctgtatttctgttccaggtctttggcatactgttaataatgaacaaatattatattacagtaaaactgtatcccaagattttctcagactcatctaaaatataggcaagaacttaataacactaatatgcctgttcaatgaagcattctattcaaaatgttttattaattctttacagcttcctcagcatctgattggaatcagtggcattttaatttatatgtctatttaacaaatactaatatagtgtgcactgtgtgttactcattttctatgcactttacaaataataattttatttaactttcaagacaaccatctgaaataggtgctattattatccctgttttatgtatgaggaaatggatttactgagaagtaactcagccaaggtgatggaattagttactaataggttcaggatttgaacctacatttttaaccactgtgctctaggaacttagttaacagctttaatgaatgaaatggttctgctaattgatgtaagaaactacttacatgttttgttggctaggtcacctgtcactctcagttcagaatctttcaggaaatgtcctttagtctctggtgggaggtgtactgcaactaaccgtcctttgaatttatgttgccatgtacagtccctgtaattttatttcctctttctatctttacttttgggatctaagcttccttgaatgtttagcctttttgtctttttagaaaatattgttccctttatgaatatgtctcttaattgctagagtttcctaatagccaaatgaaaattacattttggcttagaaaatgctttcatctgtatccactggctatatatctgcaaccaaagtaaagtgtggaattgggtatttgttgtttgcagcatttgagcagtgtacacatcaaatgtggttaattctattaccagtaatatttctagtttcttctaaaattaccataaaggtttaggtctagattagataattatttccaatcaatctcctttcaagttggaaatgaatgaagtcccatgttttctgtgtgctatttcatatattttggcatgataattattaatagcaatgtattactattgctcttttgcttacttaaaagtatattttgcagtggtttattttattctaggtgggagaataacacgttgatatcttcttgaaataaaaattatatgtcaatgaatgtgacaatgttctatgtaagtagcaatcgaggaatgactgaaaagggattattaaatatttcaatgcatgggaaaatatttcttctacctatttactgcctaaagtaaatgctaacccagaagatatttatgtcttggtttagaaatctgtagagtgacagagcaatctgagctctgtaatgtatgcaaaatttatcaggctcagagagacatgagtatgggactttggccacataccatacctgtgcccagggacaactgttaggaaacattttgttccagactagttgtgtcacctattatcttcatgttcctggaatttgtgatacaaagaacaatgtatagccaatcgatagcttatgtatttgaaagtatattcttggtaaacaacttaggaactgcctcttgtttttttcctaaaaaaacccacttgtaatggctggtagttggagtgtataatcagagcaacttgaatctacgctcctgagtggccatcttcaacaatcaccctggaataaactctttttaaactagaaaacaaaaacaaaggaaacaacaaaaaagaagaaatctatagagtgaactatatttttccaccttgcaaatagaaggggcaaaaatcaaccttgcctatctgatgatttagtgtcatagggattccaaaatgttatttgtaacgtgtaccttgatatgctaatggtgaaatctcctgtttcttgatttggtcttctcatcttacatttcttacctcaaatccattctgcgacttcaccagcagattaatattctttcctggtctcttggaattttaataaaaacagcatggtcatggggtttcatgaagcttgcagccctctgggggatgcagataataatcaatcaatctcataattaaatgtaattttaaataagagcttacaaaaaaaaaggaatatggtgataatagagcctagacaaagggatattacccagttagtagatgtgtatatgctgggcaaagggattgatatttaaataatgtacaggagtcatctaatcaaaatggtagaggtggtgggtgaggaaggatcttttgtgaaaatggaacaacatgtataaatatataccatgatgggcaggagcacagagattttgagaaaataaagctgtggtcgcagtcacagctcaaggagacagtgggagaagggaattcggtgaactggtaaaggtggcaggatcatttggtacctcataggctctgattaagattcttcctatatctttagagctgttgaaactcactggagtcttcaacaactgagtgacaggattagatttgaaaagatcattcttgctatggtgtagagaatagtcattcttagatcattcttgctaagtcttccatgagaaagtgagtaacatagatttgaaaagatcattcttgctataatgtatgaaacagttgggaagaaggtaagttatgggaagaccatttgaaggctatcacaaagagaaattctgatcatttagattaggtgatggagagaaaggatgaggaacccagaagatagtgggaattaccaaggcagagatgtggataatacagtccatgactatagaacaggaagtgctgaaagagcatgtttctgcacatttagaattaagagggatttggagcatctggagcagaatttgtttgttgggaatgatgactcgggagaggcaggtaggggccaaattatgaaggtccatttttgtgatgtgatggcaaaaggaacaactgaataaattgagcagggaatcacagtcagatgtggagtccagagaagtctctgatggtgtggaggatgctccacatctctcatgaaattaattgagaaactgctatttttttcatctaagagttttaattatctttcatttagttcccagaggctattgggcataggcacctagtaagtaactgttaataacaacatgcttattttgggcatggcaatgtggaaatttattcctgccgagtaatcagtgccagttttatgctggcagggttttaaaagaatggagaagggattcttttgcctccattaggagaaagctgtgccttctcttcatcatatagtgactcattcaaggttggcacaaagtaactttaatcaattaatgtgaataatatcatacctttttaagcctaaaatggatattagaggctatcagccccctggaaaaaagtctgcagaatatttttctttcaatgataatgtcatatatatcatagcccttgaatctttccaaaacatttagtcaatactgaaaacatccctagagagacactcatccaatttctcacatgtgaatcttttatctatctttggaaaattttaagaagtgcttaatttcagactgcttttataaaggacataactagtagcatggtaaaagtgcagtccatgaaattaaattcctgatctgaacctcaggtcaattaacttctaaaaatactctttttgagacaggatctcactctgttgcccagactagagtgcagtggtgtgtgattatggctcactgcagcctcaacctcccaggttcaagtgatcctcctacctcagcctccagagtaactgagactacaggagtatgccaccaaacctgtctatttttttaaatttttttgcagaaatgggatcttgctatgtttcccaggctagtctcaaactccagggttcatgtgatgtgctctgctgggtgctatactgggctgacaaaggtgaataacacctaattcttctccaaagagagcgctcttcaactgatgagggaaataaacaggagagcaggcagtgaatgatagagcagtatcagaggtgctaggttgaggatcttcacaagcttctaagtcaggacatcctaattcaaaccaggaaggatcaaagaagacagtaaagataatgaccacaagttgagtcttgctataagctgaatctggaagatagaagtgaaattgtccatgaaaaaggaagaaagaagaatgtcgaagaccaaaggggaaagagagtaagacaaggtaaatcaccttttgatatcgttgctgagttgtgtgaaaggctgtcaaagtgggcagaagtcatgttcagaagagttttacattcaaattaaggagtctctgttagacagctttaaatccatgtgtctaatatcttacaaagaccaaagactcatagtggatatttccctctatctaaaaataataaacttttctttccaaagggaaaaatttttacttatgaaaaatgtggtaaaatatagaataggaaattctgaaagatacaagttcttcttgaacaatgagcaatgtaaaaatgataaaattattgcatgatacaatcttttttaaaaaagagaaaacactgagcatcttttccttaagccccctttcataaaatctcatattttgcccacttctccatcttaatgattgtggatttctttctcaagacctacttaatacatctcagttggaatttcgaaatgctggcaagtctttaaaaatagacagatgatgaccctaagacatttggaacttatcctaaaggctgaggcacagtagagaaaatatattgaataatatacaattttggtcaggaaatgaggaactgctaggttagaggccccattttctgtgtctggacactggagagaatgcttgtgtttggtcctccaattaagagctgcatgatgcctgtgccctgcaatgccaacacttattgggaacccataacctttgcttctccaacttctccagccaagattatgatgaaaaaagaggcaaaccacaattgccaagtctgttctcagcaattcgttcactggtctttcatcattaggcacattgcccctgtgtacctttggtcccaacgcataaagggatcttgcattgtaagcacatcatatgtttatttaaagaattttgaatctttgcagctcttattgactgttcagcagtgaaattagctgttgaaaagcatttgcactgggggtcgtttctggaaagaaaagaagtatttcttaccttcttctctaagactgcacattccttgggggtttacccatttgagactgcaagaagatgaaataactcacttttctctattaaaaggtgatctcaattgctatagagagaagaaataaacaattattaatattcctgtgtcagagagtgtttataaaagcaaactgtgaggttcgtaatctgtttttagacaagaaaaagatttaaagaatgacttaaagtgatgattataagaaaataaggagaaaaaggagagagaggagaggttaataggtaggggaaattgattctagaccaagcacttaagaattctagttctatgtttgatttcctttttatacatcttgcactttgctctaaagcaaaggagttacaaaatttttaggcaaaattttctacccatgattagcgagcatttatagaaagaagcaataagttctttcagttgaatacacccagtacctctaaaaattaatgtaaagagcacatttcatggtcactaaaagaagggtgcaatttaatgtatgatgttaccatttattactaagaggacctgatacacaaaaatataaattactttttccatatcttctttcagcttcaaatgattttgattttttttttactttagatactcagagtagaatttataaagacatttggggagtatttctacctcaaaggaaaacaaaaatataatgacatttaaccatttcagatatttcatgatatgtagttagttttgtgtatgtttctactacattaaaatatccaatttattggttgtcttgaaaggcttttgttttctgcagagattggatttccaaatatattaaaataattgcagtatttatattgtccgttcttaggggctgtacttatattgcatttctttgcagagttattgatgatgtatccttgttctgcagtatggcacttggcaaaacattgcttcctagtttgaactctccaatgtaaccttcagggggaaatggttctagaataccattgcatcaactcttttagcaaattgcattattagacatccatttataacttatcctctaagtgatctcagtcgaatcatttgctgtcttggtttcacttctatgaaatattctagagcaaatgctgcccttgcttgtgtcataggactgcagtgttggatgccttctgtgaagttcatttagcccctcataatatgcattccatgtaactaggagggaattttctttgggtagatttctcagataagttgtaaggggtggtgtgactggctaaagtgcatcagtaagagatcattggcttgtgaggagtgcaaaaggcaggcagacaaggggaagaggaagtggaagaagccctacacatattgagcaccagtccacaccacactccccatgaagcacttttcatacattgcctcatgtagactttgagatgactctgaaatctgggtgttattagaggccagagatctcaaaaaacttgctctagacacttcatacaaccggtaaagggtagaattggcatttgacacaaatttgactgcctcctaaacttaatacattttctgcaaagttattggagacaatggagcatgaaatatttcttagtttcaggggttgaagtatcatctgcacttagttttcttctcaaataagataaactctaaacaacaataagaaaagtagatttgtgagttttgtacgaattggccagctattaatatcatttggcattctaaaggaagaacggctgaagtaaaccacaggtgcagatcaaatcttgatgtctgtttcactgcaggagacaaatagaatctctctttcttgtatgcttctgttatgttgagtctaaatctgaggtaatcatgatcatttcaacctgaggtatggtttactaaattaggagaaacatacaaaagtttgttgacttttaagctaaagaaggcaaaagccataagtgaaacaattcaagtagagtgctataatgtgactgtttctaatgacaacttgaattgattgtaaaataagtctggcagttaaaatgtattagtgttggctgagcatggtggctcacgcctataatcctagcaccttgggaggctgaggcgggcagatcatgaggtcaagagattgagaccatcctggccagcatggtgaaaccccgcctttactacagatacaaaaattagctgggcatggtggaggctgtgcttgtagtcccagctacttgggaggctgaggcagaagaattgcttgaatccaggaggcagaggttgtagtgaggtgagatcacgccactgcactccagtctggtgacagagtgagactgtctcaaaaaaaaaaaaaaaacatatatatgtgtgtgtgtgtgtgtgtgtgtgtgtgtatgtgtgtgaaattatgacagaatttacctgtaaggtgttagtcatggaatactatgcagccataaaaaagaatgaaatcatgtcctttgtagcaacatggacgcagctggaggccattaccctcagtaaattgaggcagaaaaagaaaaccagataccacatgttctcacttacaagtgagagctgaactgagtatgcatgtacacaaagaagagagcaatagacactgaggcctacctgaggatggaggttgggaggaggatgagaatcaaaaaagctacctatccggtactatgctctctacctgcctgatgaaataatttgtataaccaaaccccagcaacatgcaatttacccatgtaacaaacctgcacatgtgcccctgaacctaaaagttggaaggaaaaaaaagggatagatgttagattattccaacctcagcattttaaataacctctatgactttcttagataagtaatagtaataccaaaataattagagagtggtagagttccatcaccaggtctttaccttcattttaggaataggttaaggcatcaagagataaagtaattaataaaggattatgctgtgatctgaaacacaagtacagtatttgtatttctgagctaagactaaagtccagatttctttcatttcggtgcttgttcgtttataccacactgccccaaaggacactaactgtaatagtactttgtcctgacatttaggacgcactcacacccttttgtccagatgtttctgtcttagatttccttactaaacactaggattgtgaaacctttcctttcctttctagggacaaaatggtattcactggcatatctagtttaatgctttgcgtacagggtgtgccacagacaattgggttaatggttgtaactggttaattgattgacacttaattttcagagttcgaccataactaaagagagatgagctccttgaggagcttcccactcccctagtcctcttctgctgaaaactactgggtcctcaatttttcctgaatacaccgctcatgtggccacccctaactgacccagttgaccatggatccaatttcagccactttgtggattggccaaaactctaaaaggaagcttaccatcaaaatttctgtccaaaaaggaatgatgaacaattatctaggccaactgaattcttctttactctggtactgaaaacatataaaagaaaggaggaaatctgagaccacaaggtgggaagggttataagaatttacagaagtcacaatgatgagaaagcagaagatatgaggtggagaaggtaatacatacatagcaaagaagttgatatcgactagatatggcagctgcagtgaggccagagatccactgaattgctgcatatcacaaaagtggagaaataataaacacatgattctgagggaataagttagcctgtatacttgaggtgccttagatcctatgcttttccagttctgcttcccaagttcatgtaccattccagcaaattccggaattcttttcatactattcattctacaataacttgacccctctttttgttgacgatgactttctgttgcttacaataaaaagaccccagtagctgggcacagtggctcatgcctgtaatcccagcactttaggaggctgaggtgggcaggtcgcctgatgtcgggagtttcagaccagcctatccaacatggtaaaaccctgtctctactaaaaatacaaaaattagctggacatggtggtgtgcgcctgtagtcccagactcaggaggctgaggcaggagaatcagttgaacccaggaggcagaggttgcagtgaagccgagattactgttgattactgttacactccaacctgggtgagagagagactctgtctcaaaaaaaaaaaaaaaaaaaagaacaaaacaaaaaaaagcctaaattatacaacaggatccatgggagaacatcttgatagctttttagcaggaacatcacattccaaatgcttgctagctattttctgagtatcagttatatttaccatgatcctgaggagcagaccctttattgtgtcccagttcagtttgcatcgtcttcatacagcataaggcaacagtgatagaaataatctctagagtaatctccaagtacctttccaaagctgctatgcctcaagtacttcctttaacctttaagcgtctgccttgcatacagtcctcttgggccactcttggcaaaatatttggaaggagatctggaacctgattatttctcaatgaaaaaataatttgcttttgcactgggaagcgacagtaatccaatataagcatgccattgaaaaccttcatgccctactatttcttttaggacttttgtgaaccctttctctttgatacattacctttggcaatcatggtattccaggacgtgccaatgaagttggctgaatctgaatggtcttggaagagtggtttgtggttggaatttctcttgcttgttgatatatgtactttccatgttggactttgtgcttatgtgaattctccacgtctcaaaggcattatgtctagcaagcaatttctcataaattcttatccatacagttattctatgagagcattgcaaatatagtcagattaggctttgatttgtttttcattctaatgctatctaacaaggggatgttctgatttgtgtagccctgtgcctccaagaagttaacggtaccagatacacagctcatttattttcattgtgcccatgtggttttctgaagtcacactttgtgttgttttacatatgggaaaatggaaacctggctaacttgtctttagtaagtgattggtggagaaattagtagaaactacatctccaaattcctgatctaggtaatgctgtttcaacaagctaagttgcatttgaattttgaaatacccactctagattgcaattaccaaatagttgttatgtacccaatcacaggatatgcttttgaaatttttttcattagtacatggaagagagagttttatattgtggtaggtagaaatgcccagacaagacaggactgagataaattaatggccagtccatttattttgataaacacaaataggactaatgcaccttgagctttaggaactagcagggcatttctagttgcagcatagtcacactaaggtgcaaagagtcaatggacaagcaaaaatgtgtaagaagaaaataagattctttgtttgttttctttatttgacatatttaaaagaaggcaaaagtgtatcttccaaaaagtacattttgtggtagacacttttcctctgctaaaccatatgacatcaagtggcatcccttttcttcctttgtggtcattctaaccctgatcccagattggacaaggttgaaatatcagcatgaagtgaagttggttctggttaaacttttccaggattgtcccatcttccagtccttgtaaatgagtgtcatgctttgttgccaagtcaatgaggagacaatgttcacatggagacccttgggcacagatgaaactggaattccttctcacccatttcatacagatagtatgaaactcatttcaactgagaagtgaaaattctggttaaggaagaattggtacttgaaagttgttactttaaaaaattatcttgattcatggttttacaagtcagttataaatgttaatagcctccatcactgtcatgttagctgttgtttcagaaaagaaatacatattgtagtagttttaatagaaggagtaggacagtaaatgtaaatgtctgtcctaatggattgttttatacattagagaacaattttttaagtgatcgagtaaacaaagtccccctcctacctccacggtgattgtttctcatagatgaaaacagttttctcatcctgacgacgacaacaacttcttcttcttcttcttcctcctcttcttcttcttctctttttctctttctttcctctttatttttcttctttctttcctcctcctcctcctcttcttctgctgcttcttcttcttctccttcttcatcatcattatctcatcatcattatcatttcagtgaccagttagtgagcaccttcatgtccaagcactgtctggggtcttcacagatgttatcctaatcttcacaccagtttaatacaagtgtgttaatatatttgatatgagtgctaggatatagtatttggagatgagggaagctaagctcaaggtcacattctgctggaactggatttgacaccagagctgtctgattccaacacccacactcttccctctgccatatcctgtgggtgtgtatcaagttttctcccttgcctgtggataggttgcctattttttaaattaagctcactctttatttctttccttctccctcctccttccccaatttcccttttctccttctctttctttcatttttttcccaagatgatatttacctgcaatacactattgaaaatttctctatgcttctgccctgatctaatacaatttttatcaagggaaaaataacatttactaactaatacctttccctgtagaacctgatagaaaataaagcataaaatttaaagtttatgacacactgcaattcatccaagggcgtctaaatgttcaaagaggcacaagagagagataatttgcttttaaaagaaaatgaggccaggctcagtggctcatacctgtaatccaagcactttgagaggctgaggtgagaggattgcttgaggccaggagttcaagaccagcctgagcaacatagtgagatcccatctcttaaaaaaaaataaaaaattagccagctgtctatttaaaacaagaaagaaagaaacagaaaatgggaggaattcaacttttgattagattgtattggatttctgaaaggaaaagggggtaccaaaaaacagagaatttgttgattaagtagtgtttaagagcagaaatgtctgatgttcagtttaaagatgcctgcactgctgtgatgtaacctctgcttgcctgatactgaactctaaccatgtgtatcacatcctagacaggggagggaatggaggataattgacaagaacagcttttgatgttaaaactaggagccaaatgcaggcagggaatactgtgggaagagagcaactagagttgaaaggatggaattttccataagcaatacaaagatttttgatacctgactcctacttaaaattaattcgactagaaagactcatctttttctgaaaaactttctaatcatatatcacttattttagttccacatttgaaagcactgttgccacaaaatcacctattcttttactgattttattaattaataaaagacattgtgtaggacagtatatttgtcataattatgggcagatataagcattagctccattgcaaaataggattaaaactgaatgtacagtgttgtcaagtatgaaatatttttcccagaataaatgagtagagaagcatttaaagtctccaaaaactccaaggggcctaagtgggctctcttccaaaaaaataataataacaagttatgatcatattaccctgaaatagattcaattacccaaacaattagtcagctaacaaatatttatcaaggctcactcttctaactgatctgggatacagaaggattgtaagaattagtatcctccctaatggagttttcattctagtatgagagacaaaagtaacacttaaaagctaaaattgaatgagttagttacaaagtctgtggggttgactcgagtagagggtggttgatcagtgtaggtttaatgaaattaaaatgagtaagattctataaatgcaagactggccagagaaagtggggagctctggggccagaacagcagaggaccaaaggcatcctacacagccaattaaggaattttcctactgaagcatggggtccagggagcttcatttgtaatcccttgttctgctttgtttcattcttggactctaatatggtttgactgtgtcctcacttgaatctcaccttgagttataacaatccccacgtgtcaaggttggtgccaggtggagatgattgaatcatgggggcagtttcccccatactgttctcctggtaagtaaataagtctcattagatttgatggttttataaaaggcagttcccctgcacaagctctcttccccaccactgtgtaagacatcccttttctcttccttcatcttccattttgaatgtgaggcctccccagccaatgtggaactgtgagtccattaagtctctttcctttataaattgcccagtctcaggtgtgtctttatcagcagcatgagaatggactaatacagactccatcacagacctttgggctaaggactttacctctaggcacctgccctattacttctattaaatggtgtaaacacagtttgctcacccatgcaattgccttactgtgattcatcttgaagtctagcctgatgacagggatactatgcaccccacaaccaaccctactgagtaattggctccattaaaacaagagagaattgtgagataatctggatagagttagagttcacaccaaacatagagtttccaatttaatggattagtttcatttttgcaacattcagtactgataggatgggtcaattttggcagggtctagttgccatcttaaagcgaggtacagggtgctatttagagcactttgcagcaacaaagaggacaaggtttgaggataattctaatagctcttatacaaagatattgaaccaagtaaatttataatatgtgggtctgcaaagtattcatgtttcttgagaggagtgcttcagattgagagacgggagcaatctgtaaagaaggaacccaatggatggacactggggaatgaatatcaaggacacagttaggtatgaatttaagctagatgttcacttaggtaactgtagcctggagtggaatgacaggttagaagaagtctcctaggctgggtgcagtggttcatacctgcaattccagcactttgggaagccgaggtgggaggatcacttcaggacaggagttcaagaccagcctgggtaacataataagatcctgtctctacataaaatttaaaaagttagttgggcatggtggcatgtgcctatagtaccagctactcaggaggctgaggcaggaggatctcttgagccaaagaggtcaaggctgtagtgaactatgattgtgccattgtactccagcctgggtgacagagcaatactctgtctcaaaaaaaaaaaaaaaaaaaaaaaaagacttcaaatagcttacctatgaagaagctgcttggtaataccttaaatttcccttctatgcttttacacagaaccctaaccttgcagttgaggacttgagtcatctcacaattcttttgggtaaaaaaaatgtaaactactgtgacccaactttctttacagctgggaaggcctctatttgattgaaaatataaattaagatactaggttttaagttaaaatattaaattacctctagcttttaaaaatcataaagatctttctttaactaacagtagagggatctagtgtttcaagtattgaattggtttaactgagcaatttctgaatgtcaaagcaacagattctctaataacatcttttgtttttctaaagtttattcccatattatgttatattatcagagagccatgtaaggggactatcttactttatatccccatagaatttccttcccagagttacaatttaacattttgtcctcagcttttttatagaggtcaatataagaaatagcacaggaagaatctcttctcccctctgccctttactctgggcagaattaatcctttacttgtctatgtatatactgtgatttatatatactgctatggtagcacttaggtaataatattattgtaaggaattttgctgtctgagataaatcttccctatattctcccctttgttttactccaaaggactataatcctgcagagtttttcactaatgaatttaggcattatttttctctaaaagaaagatcacactgaaaattatataaaataggctgttttcctgggatacccttgtggcttgttagaacacccggagtcagctggactggactgccactcttcttcacttactttataggcagatgctattccttttagagactgtctctgaaagtgaggaccctgggttatgtctgatcgttgggcggggagggggctttaaggttctaatttttgtatgtgtcctatttccatgtcttgtttcccagataaactatttccttctatgtctctgctttcctgaagacaaaggtacctttttctcagcagtggagttggagaggaaacagattcaggaagagtccaatattactaccattattgcaattgcgtagtagtacatgccaaattcaccctgtcttttcattttacttacctttctcttgtcccacatgcttttattcttggcatgcttacctacaaaattatcctttttttctatttccgtattccctatgccctgtagtcttctttcaaagcccctttgaaatgctatcatgaaagacggatttcttttctcagtgctgtgagcacctccatctcctcttctcttctttcacggtgcccatttcttcttcatctcatcaagtatgcagtcctttcttcgtctgcactgttatgtacctccttccacctttgtttcttccaaacttgtatttcttttgtctttccatttaacaggcctcatttcttttatcttaggaatctattcataaaatttatacagtctttaaggtgcaaacaccttgaaggtagagaccatattatttctatgttctttatattggcactccaattaaacaaaagtctatgtccagttgaagtctggaagcctgataagcacactgaagtaaaagtcgcaatacacatgaatgactgaaagtaggttttgttaccagtggaaaagacatttgtgagaacaaaatgacacataaagaggaagcaagtgattactgacttactggaaatcccaggccgggcacggaggttcattcctgtaatcccaacactttgggaggctgagatgaggggcttacctgagctcaggagtctaagaccagcctgagtaacaagtgagaccctcttctctaccaaaaaataatttaaaaaaaattagccaggtatggtagcccatgcccatgcctgtggcctcagctactcaggaggctgaagcaagaaaattgcttgagctggagaggtcttccagcacctgaaagacagagaaagaccctgtcttcaaagaaaagaaaagaaaagaaaacccatacatttagctcaattgactaaaagcctaaatgaaaaatatatatctttcagcttaaagggttggttggattgatttgttgagtaaggtattactatttggacaattgtaaaaaggacctgtgaaagccatattttggcttggacaagctcacccaccccatgccccatctctactaagggggggtgggattcactgtcaaaagagttcttctctttaaattctatacaataggtacagtaattatatctaattgcatttgaaacacaatagttattaaggcaaacgtttctagactagtttcattattaaataaaaattgaaactgagagtttttcccatattggtaaatattgatttaattttttaattgaatgggaataatatgggcatttttttatcatttgcccaaaatattttaagaaaatactatatagtgtaaccttttttttttttttttttactatgaaggcattaattttgttttatttttagtacttgcttccagttcacttttcaaagtgtcctttaggcttgttagtttcaaaggaaataatatatttccttttgacttaaaatgcctatgctatcattagatattaatagtagaagtaacagcaggattgcctggcacaaatttgtcctgtccttcttctggctaggcaatagggtgcaaatgttccttgctgtgcttttgatggtgaaatagaaataacgcttcacattttataacacattatatttcataaagctctttcacattcatcacttcatttaatcatcaaaaacaattctgcaaactgatattatttttcacatttaagtgtgagaatattgatgctcaaggaagcaatgatttggctgaggacccaaagtgagtgtcagtgccaagacttaaatctatttcttctcactcactccagagtccttcccacatcatcacactgtctccttctactgtgctttgctctaacctgctgaactaactagcaagtgtctttagcatactacattagatagctaagacttactgaatgcctactgtatgccaaatcctgtcttaagaacttacatgtgttacctaattcaatccttgcaacccatgtatgataggtaatattattatctccatctcgcaaataaggaaacatagaatttaaataacttgctcaggaaggcatagccaataaatggaataagtaagtctcaaatctggacagtctatcttgagaaatgcatgcttaatcaccatcctctattgcctcttaaataatcaaagcccgtaaagattttataaatgacttttctcatgaataatagggcctggggtgagtttctcaatatcacttatggcaataagaatttcagcaatcataatcttggtgcattttccaaaaaggatggctccccattgggtaacacaaggtgaaatgtgtattctgttagaaatttttgattccagcctagggaggtatcaagaataatgctgttgccataaagatataagtcttgagacaaacactggagaggttcagtcattcaatcaactatacatatattactgaacattttttatgttcaaatgctgtgctaagtatctgaataatattcacatgaagctgaaaatctatcaaaaatacatttgaatacagatacttggtaaaatctctaaaatgcacaaagcttcatggacacatgaaatttctttactatggagaaatcaaggaaggtttaataaaagtagtaacattagagctaatctttgggtaaagaagaggaaaagacaaattgtagtgcatgctgtaactgtatataggttctttggagatagctcattgaatgcaaactttcagaactcacttcatgagtcaataggaactttacacaatggtgagaataaagtgcatcctttcaaagcacactgtccatggcgtgagagtaaccaccacactgacatttgttgaagaaaggttctcctgggttctccccactctaccctccttggatgccaattaggcaccttaggaaggacaagtgtcttccctgtcccaaagaattgatttttatagatatttatatctacttttgtgaacatgcaatgttcattttgattattattaaatcaatgtaaattctgaatgaatttctctgacttttactttgcttattaagttgaagactcaagggcaatgcagatgagaatttcagattcttcctttgagaggatttttggtcagtggctctttaagaagacccaaagcaggttgggtatacttcgtaaaatcagatacttggtatatagttcttttttttttcttttctttttttggtaacatcaccacgaggatttctttgctgaaatgcactgaccttctgtaaaaattaacactggaagtattttccaatggaaattgactaataaagaaatcaataatgaaggaatatttttagactggcaagaatcatgatgacactgttaagaagaaaacattgtacatatttaatatgtttaaattccagatcctcaatattatgattaagaatttaatgatttttgtttataattccttctcattgtgtgcccacatcatacttagcttaaattatgtatctaaatatgtcttctctataaagtttcttgtggtcagaatcaagtggtccactagtttcatttagcagtagatgtatatattttgacacataccaaagaagtgcagctcagtacccaaaagatgtactaactgaaaactttagttcatgtaatatgcccggcattcaccctcgcggaatttagacaggagggattgtggcctgtatgtttgacttctggaacttaccttagtaaaattcaaaaaacaggttcattagtaatttcttcaaagaaatctgcttcaatttattcagatgttttgtagtctctactttgtattaaatataaagcactgagttaaagaggtaaaaatatcaaaatgaacaggatagtctctctcctctgggatcttataatcatgtaaagaaacagatatgtaaaaactgtaaaaaagatatgtacaatataattataatataggaaaattaaaggccatacattttgtaaataaacagctatgggaacaaaaaaatgtgcatttttttttctaattggcaaagtctaaatgggattgtggaggagcagtttgtatttaagcctgcaattgaactacatgtattatttttaaaactggagatttgaagggaacactggtggcaaatagaattgtatgaacaaaggaacagagatttggaaaggcagatggatgtcagcatggctagaggacaggtacacagctgatggggcagaaggtagctatgaaaggtttgcagaagtcagattgtcagtttcttttaaagcctgctaaatgtgtacactttattgtgtaaacagtggcaaacagtaaaggttttgaactgtaatgatgtagtggtctgggctaaactattcagagcaagcattttaggttacagtaactgaactgtgggtttttgtttacatgtatccagagttgttccctacctttgcaaggtcagtgtctcagtgatgtgccttaaataccttgtccttgaaatagaacctcaacatcttcaccttgttctttttttttaaaagaccgtgtcttactctatctacaggcatgcaccaccatgcctggctaatattttatatatttttaaagatgggacctcactctcttgcccaggctgatcccaaactcctggcctcaagcaatcctcccacctcagccccccaaagtactgggattacaggcctgagccaccatgcacagacttatccctctcttaaaaaaatttgttttcaacaaattcatatgagtaagattaagaagaaatggtacaaccagacataagctgaaaagcaaaagtctcctttcctactttgtttattttgcttcccctttcagaggaaactacatttgatcattaaaccaatacatcatttatattcattttttcaaaatatattaggttggtgcaacagtgattgaagttttgtcattgaaagtaatggcaaaaaccacacttttgcacctacctaatataaaacttcatttttgttttgtctttcatattgatgaaccatcatttgtttatttttttggatattggattgccttcattgttttcactattataaatacccctattacacatacaaaatcaaaataccatttttgccttggctttttaagaaaataaacgttgattttaaaaacaatttcagatatacagaaaaattgtgaagatactacagtgaattctcatttccctctaccatgttccccctattatgaacatcttatattagtgtggtagatttgttacaataagtgagtaaatatgaatactaattattttttattgatatctgatattatttggctctgtgtccccactaacatctcaccttgaattgtaataatccccacatatcatgggagggacccagtgggagataatttaaccatgggggtgggtttttcccctgctattctagtgatagtgaataagtctcatgagatctgatggttttataaaggggagttcccctgcacatgctctcttgcctgccaccgtgtaagacatgactttgttccccctttgccttctgccatgattgtgaggcctccagagccatgtggaactgtgagtctattagacctctttcctttataaattacccagtcttaggtaagtctttaatggcagcatgagaaaggactaatacaatatcaatagatattgatatcaattatttttatcataatttattcagattttcttagttttcacctttgtcttccaggagcccatcctggataccacactacatttattcattatggctccttaggttccacttagctgcaatgttttctcagacttcctttgttttggacagccttgtcaactttgagtaatactagcagggatactgatgttttcctaagtaccagactggcgttctaggtttagtaaggaagttcacagaggtaaagtgctatgcatgatatcaagtatacatattatcaacatgactttataccattgatgttgaccttgatcactgggctgaggtagtgttgtcagattactccgcctgaacatcattgacttttcccctttccattctgtactgtttgggaggagctcattatacacagttcacacttaaggagtcaggaattactgtccacccactggagggtgaaatatctacataaattaattgaatttttttttcttgagatgaagtcttactctgtgggccatgctggagtgcagtagcacgatctcagctcactacaacctctgcctcccaggttcaagtgattctcctgcctcagtctcttgagtagctgggattacaagcacatgccaccacgcccagcaaatttttgtatttttagtagagacagggtgtcaccatattggcaaggctggtctctaactcctgacctcaagtgatcctcccacctcagcctcccaaagtgctgggattacaggcgtgagccaccatgcctggatggaattcttttgtatggcagatctatttcttctatcccatttatttatttattaattcatttatttacatcaatataggcttatggatattcattttatactttgggttaccatccaatatgacttcactttgttgcttaaattgttccagctttggccactgacttctgtgcccctctgacgtttcccatcagtgtgggatttttttttttaagcacttccttactttctggaacgacatgattctccaggcttatcttgcatattttctgcttcaacattaggcaaccagttcttcaaggagctatgactcttttaattggggaacagaacaaaagccaagacctgagtgctaagtgtgattgttactattggggtgcccttgcttctagagcttctcagctgataaagtaaagaaatttatgtgtgtatactaacttgtgcctgcgcacctatctataaatatttctatatgtaaacttctgtgtctacattaagctaaacatgagtacattttggtgtttccaagtctaatatattaccacctggttagtctagcctattccccttgtttttttctgtaaaatcctacaccaaagtgagaaacatggcttctaccttcctctatccattcacataattattaaattctattgtatgcttgtagctgaacaaaatttttaacccatattgctgtaggaaagacactttatcaactagagagtttgagtttatgtgcagttcctcttccttttagacttacagactccactcatttccaaaattactgttaaccacttttaccttcagtgaggttgtagtgtacatttgtgatatagttatattcttttggaacagcctgcattccatcctgtgataaatatgtattgcaaactctaaagaaacctttttaaaatgactaaaaagaagattaaagatgcagtgatgcgggaaatcagtaaggatataaaatcagtaatttgacctgaacagcactatcaatcaatttgttctaattgacatgtatagactattccatccaacaacagcagtatacacattctgctcaacctcacctggaacattcatcaagtagaccatattctgggccataacatttatcttaacaaattcaaaagcgtggcaatcactttgaggaacttgtccagagggtataaggaaaggacaaacaaatgaaatatagaaatgatagaaaaagtgaaataaagagaagacattgtaatgttaatgtccataaaatagaaatacaagaagcattaaaaaataaataaatcaaggatagaaaatatttgaagaatattgtattcaaatatatcttataatttttgaaattataaaagcattaagaacccaaatttgagggtttcataaatggttaacaaaataaagaaaataatcctttacctagctacattattgcaaattttaggacataaaaggcaaagagaacaaaacaaaacattcaaggagggaaaaagaaacaagtattcaattgttatatttctcaccagttatggtggatacatgaagataatacgttactaaagaaaaagtgctttaaacctgggaatttatattttattaaaatataaaatattatttaaatgtgaaaatgaaacaaatttatttttagtttgaccacttaagatgtgctttgaaaataccattgaagatgggatatccataaaatggaatattattcagcaataaaaactcatgagttatcaagccacaagaaacatggaagaaccttaaatatacattcctaagtggcagaagccagtctgaaaaggctgtatgattgcagccccacgaccttctgggaaagggaagaccatggagacaataaaaaagatcagtggttgtcaaggattcagggactggttgaggatggagagggcagtggatggggagggaaatgggtagaacacagggcatattgagggcagtgaaactattttgtatgagactgttatggtggatacattgcatcatgcatttgtgaaaactcataaaagtgcacaacaccgagagtgaaatctaatgtaaactatgacctttaattagtaataatgtatcagtgttggttcagcacttgtcacaagtgcaccacactaatgcaagatgtgaataatagggaaaaactcgggagggtgggggctgggggaaggtgtagaaggaatacatgagaactctgtgcttttggttcaacttttctataaatctaatactgtttaaaaaattaaagtctgttgattaaaaaaaattacaccccagaaagaaaatatatccaggagaacccaggaaaatatgggaagtatggatgagaaaactatcaaagctatcagtaaggtatattacttataaataaacaagaaacaaaagagaaaaagcatacacaaaacaatccagactaacaattctcaaagacagaaatgtggtgtggtgggaaaaatgggatggagagtgtgaacaaagtcatgatgagacctcacagaggcaaaaatgtactaggatacttgtcttgggggcaatataaaatcatgtatataatttaagggtaattaatacaagtgttcatttaatacagtgggaataactaaggaaaaataggatttgagaatataattctcaaaccagaagaagaaaatttggtatgaccaatgaaaggaagaaaagaaaagaaggaaaaaaagaaaggaagaaaacatatagagaaggaatagaaagggaaagaggaagaaataaaggaaaaagggaagggaggaagaaagaagggagggaggatggaagagaggaaggaaggagggagggagagagggaaagccaaaacaggcgaggaatgatgagaaggatgggtagctgttctgtggattgtgtgagttaaggggaaggaagtggtgggacttaacatcagctccatatgctacagagtcaagtatcctcacatattcttacattttccctgaagttatatattgagagccagtggaagacatcgtagaaattccctggtctattttgtgaatgtgtcttgtagtacatagataattacatgtgagccattcctataaaaaggtttagattggtcaaggatgaaagaaaaagagacttgcaggtggaaaacaaaaagggcaataaattaaatctttcaaaataataattgctgaaaaatagtcatcttaagaacctcatataactactagtttaaaatattgccatccagttattgaaaaaagcaatttttcacatcaagaatttttatttatcttaaaatatttcagaggcaattggtgttatgctttagacacttgactgacagtaaaagtttactataataattcaaatgcctcttcaaagtggatgaacagaaacaaaacgttcagcgaggtgagtgttaaattattattatttagtgggaaaatgacctgaactattttctttggttgctgttacataatccataatctgatatcagttccattttgttgtttgtatttgtgcttgaactttcaatacaatagaggtcactaatggaagcctaaaaaagaatttttatttgacttttggttcattagaagtttctttgttctagttattttccttagcagagtgaatttctctcactttctcactatttgtccaatttactacctaagcctggatgtttgtcttttcatactctggaaacatggacaaagacaaaacatagggagtttcgaggcattattcaataactacctagagaataatggctctattttatatgatctaacttggtcacttgaatgggtcatatttctccaatattcacagaaccacctaagttgtttttggttgtgtggacatagatcagattgcctttgaatcatgatttgtagatgtaaacactatttattagttgtaaaaactttatattatctttaacagcctggccaaaaggtcattattgtttaggccttctgccttccagaaagagtatgactaaaacagatgtattgggcagaatttccagaaataccccaccacccccaatttcacagggctaatatccagaatctgtgaatgtgatgtcttttcattcccatgattgtcttatgtgatatgacgtagttgaccctgaaagggtagggtattcctggcagacctaatctaatcacagaagctgttcaaagcagagaaatttctcgtgctagtgacagaagacgaaagcatcagggaaagtcagaggaattcaaagtgtataaaggacttgagctgttgctggtttgaatacagaggagccacatgagaaggaaggtggttagccatgggttgctgagagagagattcacagctgagcatcagcaaaggaacctggagctcagacctagagccacaaagaactggattctgccaacaacctgaatgatcttgaaagtggtttcttcccccacattctccagattagagcccagtaagccatcaccttgactttgaccttgtgataacttgaccaaacctagctaagctggccaggacttctgacccacagaactgtgaaataatacatgggtgttgttttaagccattgagctctggtaatcagtaatatagaggcagacaataaatatagcatctaaaaccagtagctgtttattttgagatgtcaaagaggatcccattctggtgtttgatatttcagagtgccaggccatttttcctcacatcccactgacattcctcttgttttgatttaaatgaatagtctcccttagatgtcccagacaggattataagtctctttccttaaaagtttcagttgttaagatatgtagcataaaattgtatactataatggatcttgtaaatctaaccatttgctaaggtaacacaggttgtaggaagcaaatctggtactagaagccaagatgaaggattttcaacctagtgacctttctactcaaaagccatactggctctgaccttcatattttaattgatcaggcaaataatctcaaatcctccaactttgtttgattatttggctaattctgctcagaatcctctctaaatatctactggaggcagggacattaactgaatttgaaaagcaatattatggtaagactctctctaataataccataaaataccatagcaaggttgtttttaacagataattaaatgaagtccaaaggaaataactagcttgcccaaggttactctttgcaattgagaaaactgaggcttgaataggtgtaattattcattcaaatgtcctcggccagttcatggcagagatagaaagtcgatccacatctcttgatttccaattctttttttacactgagctatgtcaatatgtcaattctatagggtttgccctcagattagtttgagaaataaagtatattcacagcctctgtgttttcagtgtactaccagctgggatatctatgacttagttccaagctgtgatattctctgggactacaaatttttaagagccattttaaaattggctagaaggcaaatctagggtgcccataatgactgtacccagccctgctatgagtgactgcactgtgatttattccctactcagtgcccatcccccactccaaagccctacaggatttaggaaaaactgctggaagaaatgctacatcatgaaagcttaaaaaggctcagggaacaccacacttgaatcagtataggtgggactggtatatttcttttgctatttcattatccattttgcagttcttataaaaaatgagtctgttgatgtagtcttctgaagcattaagatatatgctatttctgcagtgaacaggctgcttagtgaagaagagtgtcggctcacttttgttctttcatatatttattagagtacgctttcccagagtgtcgattgcatgactttattgaagctagtttgaactcagactttcccccactgaatctgagatccactgaggcccagacaccaaggagctgttacacatgtataactattccattcacacctcttcaggagtttcaaacaagtttaattataagagaaacaaaagaaagcacttcttctttgccactgctaggaaaaaaaattgctttgcttggaaatcaattcattgtaagctttaatctgcctagttcggtttctcagaatgaatatttcaaatattaaatattttcttgagtagaatgtatagtacatattttatactaatatctatgtgtgtgttagacaattaagaagactggagtgttttccaaaaacttgaaaagttttcggtgactcgtaatacagaagtgacatttttatttgagaacaatttaccagattatgtcaagttcattattggtatgatactaattatccttaggataaattggaaaggggaaccctctgctagttttctgaagagctgcgtaagcctgatgaaatgtcttttctctttctgtgactcaaagctccagaaaaatctgcaaagttgaatatcacttgtgcctgctaatcttgtgtcatagttattttctatcactgtcataatgtcagagaagcactgggaaaatctgcacatcactcatctctccttcttcacccttatccaggtatatccacatatatccaaacatccagaaggtcacaggtgggatatttttgaagatgtactcacttcagcacaggtgaacctgttgatgacttccaggtctaaatatggtgaccttagtcacactggttatttttagggagcttcctctgactctcttataaactcaagatgataaatgcaatctacctgtaagattcttgagaaatttgtgttgtataatatgaccgtatatgatcccagtagttgtgtggaacttgataggaaccacagtaagtatcacctctccttgcttccatcattcccctactccaacagtttcatcttcctcttctgtttctagtgaataaaacatagtctgctgattttaaggtatattccattcccagttgtatacacaatggttaactttacattcgtgcaatcagtcagtcaacatttgagtgtgtactctatgtcagatgctgttttaggtgctaggggcccagcagtgaacaaaacaggccattgctgtgctggaagtaaaattctagttgggggagacataaaataaggaaataaataagtatataatataaggtaatatatacaaatgaaaaaaataaagcaggaaagagggtagggttttggggggaagaggatgttaaaaagttctaatggtctaggtatggctcattgacatagtgacctttgagcaaaatcgtgaaggtgaaggagctttactctttgaatcaggatgtcaggtcttagtttagactcttcagactagatcttagccattgtttatagatttgcttaaatgtctaattctttttcagctgattatgttggagtttattgttcctaatgaccaatatgctctaccaatgtcagaggcctgattgacttttgagggacaatgactgctccagtttatgcactttctctccccccagccctcccatccctcccatcctcctctgcctaccctccccaccccactcactttttggggttcctttgtcagctgtgtattatggcaaggatcgacattttcttgacattcattgtagagaaggtgatgtaatctctccttggagggtggtcacctgctgcttgcaggctgagctaaaagcagattctctcaatgacaggtatgactgcatttcctgggcaccttcagcaaacaaggctcttgcaacaatagcttgcgtcttattcttaattacttcataccccaaattaggtgggctaaatatctttttgttgtcacagaatggaaagcacatcataattagtgtaaaacaaatatcctcatagggtccaacatgcagtatcctaaaagaaaacgaagtaaacaatttatgtattttgtaatatacatggaatatgccattaggttgttttgcaaacccatgtaggtgatcctggtagattagatttacaatatatctttcctttcacttcattctctccatcctctatccattaatttttcttatatctagaaatagggcactaaagaaaactacagtatacagttcctgctttctctgaaatcaactattaacttcaggcaagtggaacacatacttggtacattacttttttttaaatccctgtattgcataatagaagagaatggtaatttttatcatgccattaatgtgattcctttctttattgcttaaagtgtcaatcagtcaaattgaaatgggttattactctgttatcttcttcattttaattatttggctctcccagcattacccttcattacctgttctccagaggatttgttttatctgaaaataatttactgcttaacatcgatgcatttttctgatatcgttaggtgggcctggtgttacatttagagagttaccgtcatcagagtaagaggaaatatatacagtgttttatcttgcagaacttaatgtaccaaatctgatgtcctataatgtttcagagggatgatacaaatcatttgcaactagaagctgaatattcagccttgtcacaagaattctcccttattcaattagattttttaggtgtttgctttaaaaagtaatatcagattagtaatggggaagcaatctttgaaatcattggtgggccaaaccatgataataagatacaaaagagaaatgaatggtgggaaatggcagacacattacacataaacattgttttgttatggcaaatctctacggcttctcaccacgatgtcagtacggaagtttgaaagaaaaatgtatgcgtctcccgtagagcccatgaacttgttttcttttgcatattatagaatctgcaggtatttttcaaatgaggaccacaaacattcaagtattaggttttcttacaatgacagccaatttagcaagcccaaggttttagagcatccttcaagaggctggttccatttgcacgttcatgttcaattcgcaaagcaacagcagcagcctttacgtatcccacgattaacacttcaacctccagcccattttgtaaggttaggcattcatcaaaatgtcagaatgattacagtacagatctaaaatcccttttgtcagacactggactttaatccgctcttttctgtagtcacgtcctgtcacttttgcagctgacaattattgtttttggtcaaaaaattgtaccttgcaatcaaaatggcttgttatccaaattgatctctgatgctacaaaatgttgtttgtggacaattctcctgagcaccactctccctctcctccagagtttacagttgaaatggaagcaatagaaagtcaggagaacagggtggggctgaggcatgcctggtcttttcactgctaggcttggatgcctaggaaatttacctggaggcttctgagtaactgaacctctaaaagatattaaacgagactttttcactattttattcatagtttgtgcttacttttaagtgagcttttgttttggaattaaaccctgacagtcagtggcagctagaatcgccacctgtcaaaagtaaggtttccagtaaacaaaatatttacatatatcaagtgtgagagagactggggaaaaatttaatgggcaaacagaaattcatagaaggctacaaagtctttcttgaccagtctcacttgtaggtcttaagcctaagatgccatattacaggtggatcagcttcgggaggaaagcaagagctttctattggaagcaagcaaacccctctttgtgagtttctttgcatttgaggttctataaattttggagctaaaacagttagtcccttatttttgtttcactgaagctgctgaatgctaataggttattgatgatggttttatttgccagccatgaaaaatgcttggacaacaggacatgcatgacagttaatctttgtagagagaagatgagcatcagtggctgaattaggtgcggagggttgcagatgatatttaggaacacagtgacatcaagggagagggtagcccatggaactgctggccataaatagttttaggcatactaaaaatatcaggagaggataggagagactatgtggaattgctttacaagaatggcagcttcttaagaattataatgagatcagaaggtacaatgcttttcagtacttagaggtttttttctagatggaaataagcaaaagtagagaattaccagggtttacattttgtctccatcatttatagctaattgaacatgggagaaaacgtagcttccttctaaggctcagcttcctcaactggaaaattggactaaaaaagaaccatacttcagagttgttaacaggattaaatgagataatatatgtcaagtgcctagctcaatgtttggcacctcagcacatgctccagaagtggtatcaattattattacataacagagataatatttggtgggctatgtgtatttgtgagtgagagggagaaagataactgttttttttacgcatttttgtgaatgtataactttctcccaactcagctgaagcatccaccatggagagaagtgcttcaggactgttaccagagaaattgaatgagaaagagatgaaaccattttttaacatccctaatgggaattttcagtgaatggctagacagtaggcataaaagccaaactgtcatcagggaagagtctttatacaatcaattatcaagatgcctgatggataaactagaccacaagtcctgcaggaggacttgctgggatggataaagtaaggaggcagtaggtcatcccttctgttctgaggaatgtgagaggaggacaggaaggtaggaagggcaggagagtcttcctttgcagactgtatccaagactggaaagaaattttaaattagtaaaatgagataccagcagcaggaagaggaaccactttgctgaccaaccctatacccactgggtaaagggagacagagcatcaaagtgatcccagtgatgtcatgtagataggcacagagaaaatgttggtgcttagctttcttgagcatgcctgctaataactggcatggatgggactgaaaagttcctgggttgcctaaataaaatacaaaggtgataactgctaagctgtgccagtatgaaatgaaggcaggccaaggcctccacagagaaccaccagccctgattaaactataagagactggccaccagattccagcatcagatcccaggtagggcgccatacaggagagaacctacaccagggactggcatgatctcagactcccatagatttggaaaccctgtctgtccactaccctatcatctcaaaactcactacattctgtacactcagtgcaatctttgaggggaacagagaaaagagagaaaatgggaaatgatgggattaagctaaactgacatgatagactaatcctaatcctattccctccctattcacctctgtcatcaccagtgccacacagaaggtgggagtcatgagaaagacacaatgcattgtacataaaaggaaaaaagctgtgtcttcaccaactcaaaataggaaaaattgtgaccctgtgatgacaactattacagctgtcataataaaatcaagatgatggctgtatttctcaggcctcacatcaccttttcttttacaaattatttgaaatttaaagtagttttttctaattctgtgaagaaagtcaatggtagcttgatggggatagcattgaatctataaattactttgggcagtatggccattttcatgatattgactcttcctatctatgagcatgggatgtttttccatttgtttgtgtcctcttttatttccttgagcagtggtttgtagttctccttgaagaggttcttcacgtcccttgtaagttgtattcctaggtattttattctctttgaagcaattatgaatgggagctcactcatgatttggctctgtttgtctcttattggtatataggaatgcttgtgatttttgcacattgattttgtatcctgagactttgctgaagctgcttatcagcttaaggagattttggtctgagatgaaaaattcatcctgctaaaaatgcttgatctggtaagccaagtgctagagagactagaggagccaaggaacacgtaggtagggtgagataacagaagaatacccaagctgaattgaaaggaggaggtgcaaagaagcttgtgcattggattaggaaaaaatatagactttgaactcacaaggacttgatttttttccaatttgtcgtctcactctctgcataacctctattatgagttgaattttgagccccccaacccccccccaaaaaagatgttgaagtcttaaatcccaacacctgtgaatgtgaccttaattggaaataaggtctttgcagatgatcatcttaagatgaggtgattaggatatatcctaataccacatgaatgtatctgtgtataaaggggaaatctgaacacagagacagacaagtccaaagaggatgaaggcagtgatcaaggtgatccagctacaagccaaggaacaccaaagattgccagcaaatcaacagaagccaggagagaggcctgaacagattctccctcacagcatgcaaaaggaacgaaccctgccaacaccttgatttcagacttctgacctctagagctgcaggatgataaatttctgttgtttaggccacccagtctgtagtgcttgtaatgtcagccccagcaaacaaatacagcctctcaactatgtctcatcggtaaattaattatttctccccaactcataccataaaatattttagacagcttgcacaagcccccaaacaaaaaaactgtgatgaaatggctaaatagtgtagtagccatggtgtatacgaatataaacagaaacatcgtaacaggaaaaaataagaaagtccattagatgcagttgagcttccagcttgtctcttagtttcctggaaaccaaagtgaaaggaggtacctgtttggtcagaaaagttttagtattacaaaggaaatagcattgtatttctttaggggaagcaaaaactttttcttagccctaaattctacaggcagtgctgaattgctcagtaaacaatgcacttaatgatatttccttggcaaatttggtgaattatccatacactggtgtgtatgtataacatggtagtgcaacccccaacctgaaggtgacacttgtgcgcacgtaaatctctatttcttagagatgtcaaatcaaatcttataaacataagaaagctacataagcatcacaaaaaattacaaacagctatgcctcattttcataagtgatgtcctgactctatctgatctagttttcatgtaagtcctttgccactttacatctatcctcaaaagcctaacggaatctggctggataccccaggtgcttcctcaacgtagaagttttctcttgtttgtttttttttttattctgagttattttgaatatatcagtcaattttaatctaaacttgcattatgttttcaaatacaatataagaatttaattaaaaacaatgcttcactgacagcagctctacaattctgtatttgacattgtagtacaacatgcaaaggcatgtattgaggtcagtctgaaatgaaacacttagcctctatattttttggaaaaacaaatccaaaatatgaaacattcagataggtaggcataacattcagatgtccagtgatggaggtcttgctttgaggggcaggctgtttcaggtataaataaatctctcaaagtctatttaggaaaaagatatatatatattcctgcaacttcttttgtttatttttattttttgtagagatggggtcttgctatgttgcccaggctgttctcgaattcctcacctcaagcaaccctcctgcctcagtctgccaaagtgctgggattacaggtctgtgccactgtgactggcctctgtaacttcttaattctgtctgcaggagccacatggaataatttatttagtgctttaaatatatatatatgtcactaagccattttaaggaagataatcagaaaataattatcaagctgttttgaccaatataattcagattctacttcaaaaaattacaagagattgcctgaattattttttatattaaaaacatagcaggcatatgttacacaatgagttttgttctgtctttcatttgttaatactttcttaggatgataatagaaaaaaaatttgagaatttatctttctctgtaccatcaaatctacagttttccgttgtttattctcagtcatttccattcccaatttaaatgttggatataataaccagccatattaaaggcccgattctatgaatagaaaacatgaaaaaaaatttaagcgaggatttgggagatggtggtaggtaactgaacttggtaataacaataaaatgatcccaatcagaggctgttgtgtgagcacagcctgtacaattaatagtgacacttcagcagcaaagccactccaagaatcataccatcgtttgccattttatatttctctccaagattttccagagaaatgccatcaaaagcacaaatactatttctaggattccaaactctaagaaacatattaattcagaagatgttaaagcatcaaaacagagaggaaaatgttggaatggttactatttatgactagcttctgctctctgcactgaagagcgtagctatttccttcattttacagttgacattcagaaaaagtacattaaaagtacccagaaaagccttatctctgcatatttttgcaatttggaaggacaaatagaaacaacattagaacttgatacatttagtcgtactctgtattgtagacttggagtggaaaaactgtattgtagactcggagtggaaaaaacacaaactgttttccctccgctctcacaccacaacaatcaacacagatgacttctgtgaccaaatgtgtagcagcttctccacaccaacaagcaataggcaatcaatcagttctgcagcagacaccagctgggtgtcatccagtttaattccaacacagcctggatggagatatcatcagatcccacagcttaaaggctcagtcccacaagaccaccgttcgcttcacatggcagtcacaggccctgggttgttttacatgcgcttctgaccaattgtctataaatcagggttcccatgaccccttccttgtgttcaatgaatttgctagagtagctaagagaactcagaaaaagacgtgactcagtttgttgtaaaggatattacagagtacagatgaaaagatacgtaaggaaagacatggggcaaaggatgtggagcttccctcctgggcacaccaccctccaggaacctccacacatttggctctccagcagttgtctgaacctagtcttttttgtgtttacagaggcttcattacgaaagcatgactgacaaaaccattggctattggtgagcaacttaactttcagcctgtctcccatccctggaggttgggggtgggactgaaaatcccaaccttctaattctgccttggtcatcttttggtgaccagtctccatcctaaagctacctaggggttgccagtcctcagtcaaatcattagaatatgaaaatatatcattttggaaaccctaagaattttaggattgtgtgccaggaaatgatgtcaaagaccagatacatgttttataatatcacagacacatgcataggttgtccaattttttctaagtgaagttaaaaagtatttcaaccccaattgtcctattcttcccttacatcattccttcctatacttctgtctaatgtaattaagaagaacatcgaggggaaacaacttttacttgatcagagaattaactgaactattcacttcccaagtgttcaactgaaaggtagattattttatctcatcattttaggattccttttcttaactgatttgttgtttatattgagtaaagtacaccaatattaagtagtacatcttgaaaatgttttacatatttaaaggtaatagctattgtattttctattaccctatattaattttgtctgtttatgagccaaaaatagattgttgcagaaaatatgtactctttgtatcttatttctttctctgagtaaaatgctttttattttcatctattttctttcacacagcagtactttatcttcttttatattccactaaatgtatgaaatgtatgttgttttttcactgtcatgttgatggagatatgggatgattccagccaagggctgttacaaataaagttgatataagcattcttgtatatgtcttttggtgggcatgcatactgatagaagtggaattgctataggtagatgtatatttagctttaattgatactgccagactcttgcaaaatagttgaactggtttatattctcactgacaatgtatgagagttccaggtgctccacatttaatattgtcagtatttttaattttagccattctagtggatgtaagttggtatcatattgtggtttttaatttgcatattcttgatgactaatgatgtttgggacattttcataggcctcaactgtttgaatatctttttagtgaagatgttctttcgattttttgccctttgaaaaattggtttgttcatctttcttattgatttggaggagttctgtttttttttgagacggagtctcactctataacccaggctggagtgcagtggtgcaatcttggctcactgcaagctccgtctcccaggttcacaccattctcctgcctcagcctcccgagtagctgggactacaggtgcctgccaccaggcccggctaattttttgtatttttagtacagacgggttttcaccatgttagccaggatggtctcaatctcctgacatcatgatctgctcgccttggcctcccaaacagcagggattacaggcatgagccagcgtgcctggcatggaggaattctttttatattctgcttacaggtactttgtaatgtatgtgtacaggtactgtgtaatatgtttttccactctatggcttgcctattcactttattaataatgtcttttgatgtacaaaatttctttatttggatagagcccaatttataatttccttttttgtgtttagttctttgtgtttgtttgttgaaactttgcttacctgccaaatcacaaagatatttttctactcttctagatggttggtgttttagttctgtgtttagatctgtatccacctggtatttacttttaattatgatatgcaacagggaccaaggtttttatttccacacagttgctatagtaccagataaccagtgctatagtaccatttattgaaaagactatccttttctcccattgatttgcagtggtgactatatcataaaccatatacctgtgggtctccaggtctatttctgtagtttattatgctcgtttggtctattctgttatctttactcattatcaaactcctccagcttcttgtacatgtttaagattgtctttgttattgtacattatttccatttttaaataaatttggaatcagattgacaacctcctccccatgcctaccccccaaaataaatcttctggggttttgaatgctattgcattaaaaccgtggatgagtttaagtttgttggaaattgacatcttaacaatatatcaagttctgcagcctattaacatggaataacatctgcatttagttagttcatttctttcactaatgtgttctattttggaatagatgtattatgcatgtttcattagatttattcctaagtatttgtttttgatgctatgctaaatggtatttttatctcactataattgttattattatatgaaattcatggatatgaaatacaattaatttttgtatgttggcctagccagcaaccttactaatttcccttattagtcattgtttctttagtattgtttatgaccatgttatgtgtaaataatgatagttttattttttcttgccaatttttgtacattttatttcctttccttgctttattgcaatgcttcattccagtataatgtggaatgggtgataatagacatccttgtcttgtccccaccatcagaaatgcactcagtctatggtatcatgttattaattctctagtgaaaccatagtttgtatttagtaaaacaacaatgtacatttggctatttcaagcttaattgaatttctttggcctctacatgattcttccttgctgaaaaggataatttataacaaatatttcattacttataaagcaaacacttgcatttcagaatacctttgtatttcactttcaactctagaaaatatttgttaggaaagtataatttatgaactgttataatgctttagtttctattcatttatttgggatttaccatgtattgctttaaattttaagcaatttttatatgaattgcttctactctacactatgaacacaaattcaaagatagcctgtatttgtattaaatttctttgaatctcttaaggcaactagcataatgccttgtctcaataaatatatgtttattgctttagagaaaacaagtccattactattttcaaagttgaaattgcgttatatgtttaagctgccatttaaacagcactacattttgccataattttgctatagttaacattccaagtatattcaaagttgatttttatttttttcagaaaaaatgccttagtctgtttggtattgctacaaaagaacacctgagactgagtaatttgtaagaaaagaagtttgtttagctcacagttctgcaggctgagaagttcaacggcatgaccctggcttctggcaggggcttttattctgcatcataacatgacagagaaggtcaaagaggatgcagacatgtgtgaagaggggaaagtttgctaggcatcttagccctgtaacaacccactctggtggaaactacccatttcctcaagaactaatttagtttagtcttgcgagagtgagaacttactaccagaagaacaacaccaagccattcatgaaggatctgccctcataacccaaacacctcccaataggccctacctccacactggggatcaaatttcaatatgagttttgatgagaacaaaccaaccatattcaaagcattgcaaaaagttgaaaaagctctactaatgtgtaaccagacatgtgaacatatataactttgagacatagcacaacacttaaaagccttcagaatcataaaaaatgtatctatcaatcttaatattttattaactcaaattatttttacctggctgcatggacatacaacatttaccctaaatttaaaatagaatgcaaattaatattcattggtattattttcattaattgcacaacatagtgaaaataatgttaacatttttttcctttccttcttccttcttctcttttgctttttttcttacctgtaaattaactgagttgccagatatccatagttatcaatggcaatttggaggctctcagaggcagaagtggttggtgtttttctatttattgttctagatttgggtctgagcacttttataagtgaaactttccaggtattttgttgttgttgttgttgttatatcaggtcttaaactatacctttataaattcttagtcatatatactaaagggcatttaatctcacgactgttatttatgggctttaagtcctctatgcaaagggtaaaattgtccctgtgaatttcagaggtagacattaggtaaagagagagttttttgcttgacttattgcttaagtcagagcgttctctgaatcttctaactcttcatttaattcacttgaaagtatttattaatcaatgtgcctaatacatagatgggactgcttccagtgagtctgtcagtcatgttaccagagcctttatttcttcctctatgccaagcttaaaaaatcagatgatttattttacatgagccacacatgcaaatagacctgtaatgctgaaattttgatacttaaaggtaaatctagtatcagagagctctattaagtggtctagagtatattcaaattacaagacatgcaacttattctaaaatctaatgcaatctactaacagcaagggagagggaactattcagagtaaataggacattgtttatctgaaattttattgacacattaattgacaactccattttatatgacgtatacaatcaactggacctgtttaatgttagtccttagataaaaaataattgtagctcaagacctcataattgtatatatttttttcactgtacctggtacaatcatttcatgtatgaaatgaatgagtccacaatacctcaatatttgaacattttgttttaattcacttaatcattgaaccacagagtctgtgctaaatgctattatctctataactcaacaataaggagatttaacagactcaccatttaatgtgcacgggagcacagatttcaaaatttgtttcagcacaaccttttggattatcatatatttgtaccataaaataaatcatctgattttttactctactgagacggatgcatatgcaacatatttatgtgcatatattcagtgttggaaattaattcataatcatgtatatcaagtgatttggatatttacctgcaccccatctcagggaatcattagagcttgcatttggaacatttaactgattttagttatgtaatgtaattttacacacattaccttacatttcccttcaaattccttctgaatcacactgttctgatttcctggaaacgcagttcaagaaatggccaagagtagaaggatgttataagacattgagtttcgaagttttcctttaaaatacaaaaagtgaaaattccacaaaagtggaatgaaacttgatttatagtgccgcaaagaaaaatcctggaatgtgcaggaaaggaagtgaatgaacttgggaacagctgcaagtaagtatgatgaacgactctgcattgggctagcagttcatctgttccacttgcagctgcaggccaaagcgtcaccaggttttctgcagaaactcaacttggcattttaatggctgaggtgaacccactggtggccagctgctgggactgaaaatcagaagcagctccagtccttccagattgtgaggggaaaggttaaggagagggaagtggtgccttgtcccagacagacgcccattggtcctgagatttcaaaaacaccaggagagagaatgcctggcagtggagaaaccaacactcagccttctctggaagaaagaaaaggcttgaggcaggattctcaagcttcatttaattacgatcaaatagggactggcagaagagcgtagctgcagatttgcagtaactctccctaaaagaacatgagctgtgagagagtgaccttgcagccagcactgatttgacattcacctgtttccctgcttgcattggaataccgctgggttagtttggatcccaaacatagaaaagtaactcctagcaggaggcagaagagagcacttaacattatgcggccaagaggttacactggctgctgcctcttatcaatgggtctttcaggtcctttttgggagcaatcctgggcttcattgccctgcctaaactgtagtttccaagcagtttctcaggcagttcctgttacattctgtgatcctgcctaatacagtaatttgattccagttgaaaacttccattacatacatgtcttgaatcgggagagttagagccttatactttgttcctctgcaaaactgtaagagcatcactgctgtattaaagggaagtgagtggaaagttgcaaagtgagcctttgagttcaagaaaacagatgaaaatgagcccaagccttggaactacagttctaagttttgagtggtggacagagtgggaaaccacgtagcatgcaaaggggagcggaagggcagaggaaggaagcaaggctacagtgtttggctgtgttctaatgtgctctggcatggagttatcgtgagtggaactaatattacataacactatgtatattttggaagatggctgggaaatagcctttggagccaatggagatttattaaataaaaattacctcaagcttgatttttcatctttaccaagcaccatagtaaattggcatctctgagactcctgcgggagccagaaagctggaatcaaaaattcagaaacatgaaatcaagaaagaactgaaaatctgaatggaaagccagtcacaaaagaataagaagtaaaatattctttaattatgtattatctcctacagatcaaaaggaactttccaccatttcattgaacctgtgagtgaaaatgatcccaaaagtatagagaaaataaagaacagtaagcaaattaattcagtttatatactgtcttttaacctgtttagaaagaatttgagaattgtttgatcctgattatataaaaaagatatatctgtatctatgtctacgtatatattaatacatacaaataaaatttctagaaggaagagtacacaattaacagtggttacttctgaagaatgggaatgggatgttggaggagacagatctgtcacttttcattttatatttctctggtgagatcaagggagcatcttactttgtaaatattaaaaatgctgaaatatgtaggttaaaatgtaattaatctacattcctatttttcagaattaatctgacttaccatctggtcatttttgcttgcttacattttttcttttgcaaaactcattatgttgttttgctaaaaacaattaaaacaatgcatcaaactagtaagaaaaaaaaagtctcaaaccacagagaaagactcacaattaccattagatacataaaattctatgatatatttctttgtacatttctggatcaaataatggcaagatggatgaactgatggatagatggatatatagacatgcatcgatgtaggcagacagtaagatcatagtataattgatattttaatttaacagaaggttaaaactgaaattttgcttttagaggaactattgacctcaaataaatgttttattttcaccttaagacgtatctttttctaaaagatccaaagttaacttgaaaaacatggaagtcgatttttttttttttttttattttaacctatcaagctcaattgactccctctcataaaagtggaggcacagtggctcacgcctgtaatccccgcactctgggaggccgaggcgggcggatcacgaggtcaggagatcgagaccatcctggctaacaaggtgaaatcccgtctctagtaaaaaatacaaaaaattagccgggcctggtggcgggcgcctgtagtcccagctactcggggctgaggcaggagaatggcgtgaacccgggaggcggagcttgcagtgagccgagatcccgccgctgcattacggcctggccgagagagcgagactccgtctaaaaaaaaaaaaaaaaaaagtgaagatattgccacaggtctcaggtcctctttccctgcttcactttctattagttttatcagttaggtttacatttactaagtttagagcatatacaatctttttttctttttttttttttgagacggagtctcgctctgtcgcccaggctggagtgcagcggcaggatctcgactcactgcaagctccgcctaccagattcacgccattctcctgcctcagaccccggagtagccgggactacaggcgcctgtgcaatctctatggtaaccacatttcccagttgactactaccggtaataaaatcaaatggattcagtgctcacaactcttcagtctttgggctactttccattcttgaatttttagctgaattcatctctttggctggattttgtggtaaagtagttttttgcttattttttcccccaagaagggcttacatgggtctttttctatgaattattttcctacttgacaatatttacttgttacttttttactttcatcatgccttgggcgcatataatactctcccttcacattttctttccttgaatttgtggagaattttccattttattcttgcagtcaactttactgaaaacaaatctgaaataaaattaatgttattctaccgtataggcgattggctttttagtcccaagatgcctaaaaataagttacccttaacacataatagcttaacttagttaggtctagaaattgagggtttgttttgtaccacattttctagaaagagtgctccttcaacctaaagatttacttagctttttttcaggaaatttcttggattagatcttagaataaatatttattttcatttgttaaattctctacttcaggaatatctgttaacattgtgttggatttttttgtttaaagtattcacttttctctaattgcttttatctccttatctgttcatcttccttcactataattatcttaatccccatttctctgtatcagtaacttaattttcaattgcatccattgtttttctaatttatgtattagtttcataaggctattgttttgagttctttcccccttatatcggtactctcctttatcatctaattctgttattctattattttgtctttgaattttgttttagtgaacttacattcctctattatattacattatattagaattagtagttttgagtaggttggttcatgagtttgtgagtagggtagtttcaagtagggttgagtagtatttttatgtttcttgtgataattttgccaaacaatgaatatttctttttagtataaagatgtctcatggaatatttaggacatgtatatgctaaaatttatttgttgcttatatgaatttcaaattgagctgggtgtctctatttttatattttaatttgctaaatctgtatgttttttataaatttccttccttccctccttccttccttccttccttccttccttccttccttccttccttccttccttccctccctccctccctccctaatctaggaggattttatagttgccatagcgttttcttttctttttgctcatgcttgtgtgtccctaagatgccaagttaggtgggatatattgtaggtggcctcttgactctcttctcaccatactgtttgttttctttacttaatatacagtctgagaactgaatttactttcatggattatctgtttgtctgtaatctatgggaatactgggtgatgaaggcagggatctagtcttagatactctgcagccttttctctgtctcctaagatattttttctgtgcaatgggagaggggtttttgtccaatcccctgggaaatactataaatgaataatttctcaaatttgctgtgtattcttgaatcttcactctcttcaaagagacttaagccactatttcattccgggtaggagcagctaaactaaactaacagaaaagctacaaattacagtggcttaaaaaacaaaggacatttttcttgcttgggtaaagtttcatttatttttccctctatttcattgccatgacttttagggagcagtgacttctaaattgtggttcttaatcaactagagtttatagtttgtctaacattttaaaaatataatcagtttctttactactatttttatattactaattcattaattttcacccaaatctttaagaacatggctctcatggttagggaaagaaaattgcgcaaaggacttgtgtccataccgtttttttggcctcactattcctgaatgtggtttctttcttctaatgaccaaactttaggggactaggactgtgcatctcagaattaaactggtatttctgatatgtatggtttatggttcaatggaaaaatataagaatttttcaaataattttctgattgtaaggatgaatgtgacctaatgttaaaatggcaggacagaaatattaaagaactgaatgatggcatcagctcagccatttagtatttgattttggacttagtttcctcatctgtataataagagctttgcctatgtatttttccaagaccatttcagggttttgcattattttatttcatttggaattaacattcaggtcatcttatagtagtgtactgaataactgaatgttaaatgtcttgctaaaataaatattgggttggtgaagttgaagttttggaataatagctaaaattaataactatagattttaattaatgatttcattcactaactttcaaaagttagacattcaaaaactgcaagaagaatattttttcaagattataaattgctagattcttcctgcagtggaaaggggaacatgagatatttgcagtattaaatagatactcactttcaattgatacatttaataacatcactaaccttcctattcatagtgaaatgagtgatgaaaaagttttttagtaaatattttttactggaacagaaataattttgtagcaggattcataatttgtgtatactgatttaagaatatcattacttcctgaaagtggcattcatctctatgggtagtcattttaacaaggtttttgttaaaaccttccccttcattaacacactttaggaaagtgtcttctaagtcattctatcaaagtctgttgctttcaaatttgattaaagaaaacaaagtattatttgcgtacctcatttttctctaacacatttttctttgcatttctcatattctggattatgtggggatcaaatatgatttaaatgttatgcacaattttgtggtttttcctactaatgaaattttgagttgcaaagttaacattctgccattgttaatatattcttattataaaaagacaaaatttcaacacatttcatttaaagatctcaattggcttttacttgcaattccagaatcgggcagccattagaaccaaaacagttctgaggagctcccaggctgcaatgtggtgcgaaatgttttatggacagaaaatggaaatgaggtgcagaaattggaggtgagattcagagatagctgattggttacagctcagcctttgccttgtttgaacatggtttgaacagttgattgactgaagctaggctgctgtgattggctgatactttactatttgttacaaaggcaaattcctaatttaagctttcaaattgtttaagtactaagttaggttttactttgttacttaggactcatatcgaggtttctaaagcccacatctgatacgatttaacattacctatgtgaagaattactaagcagaaacattttgaaagcctcatgacctgaatcgtattaaatacttaacaattgaatttgtctcaataataattatgtttaaaattatgaatgctggtttgtaaaaaaaaaagccacaaattttaaaattctgatataatctaatatctggtattcagctttgtattatcattttaaaatttaatgaacatctctggactctaaatatttttctttttaaagttatataaaacattctctttatattcattataactattaaactatttgcctacttatttatattgaaagtccttaatatttttacaataatttaataggtttcacaatcatcattacttattatagtttatactgtttgaataataaatatatgtctatactatgactcattgatacatttcaaaatacagtgcacataagaagatcttcattctctagatctgtcatactacatatgtgaaagttaacatttgtagtggcagtgaatcctaggggcagccttgcatgttaatgttatgtggttgatttgagaggatggggatctgtgtaatcatatgatgacaatttgggtttgggaatctcagaaatgccatcagtataggaatatggctattctgctcttcctaggctaagaataaacttgaagacaaagagtagattttggccagacactgatgctaaagtcaccccgatgctgtctttgcttctaaggtataaattaccttattttaagcaactttttcaccttttcaactctatccctttcctcagcctctttcatatgtgaaataaaatattcacttactactgaggatgattttttttaaacctattaaagaatactccatagctacagaggggaccatatcctttagagactccgttggggatgatcatatgcagaattattcttgtccctttgcctctgcttaatccccttcacaaagtctgtggctcaaacaaatgagagttggcagtactaaaggaataagttcccagcatacgtctgccatgctttagcatcatttcagattagaagcatggagcaaaggcagggagacgggtcaaacaaaatgctgagagcttccctccttttaaaaaacaaaattctagtcagggaattatttttaaataaaatgcaagcccccaagacataaataaacagccagcatataatactaacaactcaatgaaagatacttccccaggtcaactcatctggtaggatcagttattttgtgttactgcattgcccctctagcgggatcatagaagaccctaaaggctacaagaagaactgctttctggctctcaagtcatttcagtggttccctgatggcagctgtctctttggggaggtggtgccgtggtctgtttggggttaggccatcagcacaggccccttgtgctagcatcacattgtcataagctttctgctaccatggctaccatccatcaccaggctctgtctccatgggcagcagcctctgtgcccaggccaccccaggacctcaggcccatctctctttccaaaggtaggtaggtggccttttcccattctttagtttttgactttgtataactgaagcttctcctgggatgatgcaggcagctgctgcacagtcactccagacttactcttcactttgttgttaggcccctgcagctcgctgcacgtgactggtgccatctgccctccccgcacgggcagctgcccctcccacactgcctatttccccctttctgctttttgtagccacatgtctaaagatggcaggccagtctctgtggtctattttatgggactttcatttataactaggcagcaacccacattagttatttatcctgatgatctccctcctcttgccccccatgacaggccccagtgtgtgttgttcccctccctgtgtccatgtgttcttattgttcagctcctacttataagtgagaacgtgtggtatttggttttctgttcctgcattagtttgctgaggataatggcttccagctccatccatgtccctgcaaaggacatgatctcattccttttaatggctgcatagtattccatggtgtatatgtagcacattttctttatccagcctatcattgatgggcatttgggtggattccatgtctttgctatcgtgactagtgctgcagtgaacatacacgtgcatgtatctttgtaataaaatgatttatatcttggggggtagatacccagtaatgggattgctgggtcaaatgatatttctggttttagatatcacaacaccatcttccacaatgattgaactggtttacattcccaccaacattgtaaaagcattcctatttctccccaacttgccagcacctgtcatttcttgactttttaataatctccattctaattggcatgagatagtatctcattgtggttttgatttgcatttctctagtgatcagtgaggttgaacttttttcatatgtttgttagctgcatgaatgtcttcttttttttttcttttattttcttttttttgagacaaagtctcacagtgtcgttcaggctggagtggtgcagtggcaccatcttagctcaccgcaatctccaccttccagcttcaagcaattctcctgcctcagcctccgaagtagctgggattataggcacctgccactatgcccagatacttttttcgtatttttagtagagatggggtttcaccatattagctaggctgatctcaagctcctgacctcaggtgatccacctgcctcagcctcccaaagtgctggggttacaggcatgagctgcctcactcagccatgaatatcttcttttgagaagtgtctgttcatgtcctttgcccacaattgtattgttagtttttttcttgtgaatgtgtttaagttccttgtagattctgggtgttagacctttgtcagatggatagattgaaaaaattttctcccactgtgtaggttacctgttcactctaatgaaaatttcttttgctgtgcagaagctctttagtttaattagatctcatttttaaatttctgcttttgttgcaactgctgttggcaattttgtcatgaaatctttgtgcccatgtcctaaatggtattgcctagattttctagggtttttatagttttggggtttacatgtaagtctttattccatcttgagttaatttttgtgtaaggtgtaaggaaggggtacagtttcaattttctgcatatggctagccagttcttccagcaccatttattaagtagggtatcctttccccattgcttgtttttgtcaggtttgtcaaagatcagatggttgtggatgtgcagtctattttttttttttttttttttggagacagagtctcgctcttctgcccaggctggagtgcagtggcaggatcttggctcactgcaagctccacctcccgggtttacaccattctcctgcctcagcctcccgagtagatgggactacaggcacccaccaccatgcctggagatgtgcagtcttatttctgagttctctattctgttccattggtctatgtgtctgtttttgtactagtaccatgctgttttggttacagtagctttgtaatatagtttgaagttgtatagcatgatgcctccaggtttgctctttttgcttaggatagtcttggctgtatgagctcttttgtagttttatataaattttaaagtagtttcttctaattctatgaagaatgtcaattgtattttaatggaaatagtattgaatctataaattactttgggtgttatggctattttcacagtattgattcttcctatccatgattatggaatgtttttccatttgtttgtgtcctctcttttttccttgaacattggtttgtagttgtccttgaagaggtccttcacttcccttgttagctgtattcctagatattttattatctttatagcaattgtgaataggagttcatattcattatttggctctctgcttgttattgttggtgtatagaatgcttgtgacttttgcacattgattttgtgtcctgagactttgctgaagttgcctatcagcttaagaagcttttgagctgagacaatggagttttccagatatagggtcatgtcatctacagacaaagacaatttgacttcctttcttcctatttgaatatcacttatttctttctctttgcctgattgctctggccataactttgaatactatgttgaataggagtgttgagagatggcttccttgtcttgtgttggttttcaaggggaatgattccagcttttgcctattcagtatgatattggctgtaggtttgttataaatggctcttattattttgaggtatgttccttcaaaacctagtttattgagagtttttaacatgaagggatgttgaattttattgaaggccttttctgcttctattgaaataatcatgtggtttttgtcattggttctgtttatgtgatgaattatgtttattgatttgcatatgttgaacaagccttgcataccaacaattaagccaactttatcatggtggataagctttttgatgtactgctggattcagtttgccagtattttattgaaaatttttgcatcaatgttcatcagggttattggcctgaagttttctttttttgctgttatctcttccgggtttggtatcaggatgatgctgccctcatgaaatgagttagggaggagtccctctttcaattgtttggaatagtttcagaagaaagtgtatcagtttctctttgtacctctgatagaattcagctgtagaccagtctattcctgggcattatttggttggtaggctatttattactgcctcaatttcagagcttgttattggtctactcaagaattcaacttcttactggttcagtcttgggagggtgtatgtatccaggaatttatgcatttcttctagattttctagtttatttgcatagaggtgttaatagtatcctctgatggttgtttgtatttctgtggggtcagtggtgatatccctttatcatttttcattgtgtctatttgattttctctcttttcttctttattagtctagctagtggtctatttttaattttttttttcaaaaaaacagctcctggattcattgactatttttaaaggttttttgtgtctttattgccttcagttctgctctgagcttggttatttcttgtcttctgctagctttgtggtttgtttactcttggttctctagatcctttagttgtggtgttaggatgtcaatttgagatttttctagcttttcaatgtgggcatttagtggtatacatttccctcttaacactgctttagctgtgtcccagatattctgatatgttgtctgtttgttctcactcatttcaaagaacttcttgatttctgccttaatttcattatctacccaggtgtcattcaggagcaggttgttcaatttcgatgtagttgtgtggttttgagtgagtttcttgagttctgatttgattgtgctgtggtctaagagactgtttgttgttatttcagttcttttgcatttgctgaggagtgatttactttcaattatttgatcatttttagagtaagtgacatgtggcaccgagaagaatgtatattctgttgttttggggtggagagttctatcgatatctatcaagtccacttgatccagagctgagttcaagttctgattatctttgttaattttctgtcttgatgatctgcctaatattgacagtggggtgttaaagtatccccacaattattgtgtgggagtctaagtctctttgtatgtctcaacttgctatatgaatcagggtgctcctgtattgggtgcataaatatttaggatagttaacttttcttgttgtccccttcaccattatgtaatgcctgcccttatttgtcttttttgatctttgttggtttaaagtctgttttgtcagaaactaggatttcaacccctgcttttttctgttttccacttgcttggtaaattttcctccatccctttattttgggtctctgtgcagctttacatgtgagatgggtctctttaatacagcacactgatgaatcttgactctttatccagctttccattcttttagttggggcatttagcccatttacatttaagggtaatattgttatgtgtgaatttgatcctgtcattatgatgctagctggttatttgcagacttttttgatgaagttgcttcatagtgtcattagtctgtgtactccactgtgtttttatagtggctggtaacaggttttcacttccatatttagtgcttccttcaggaactcttgcaaggcaggcctggtggtgacaaactccctcagcatttgcttatctgaaaaggattttatttctcctttacttatgaagcttagtttgaccagatatgacattgtaggttggaaattcttttcttcaagaatgttgactattgccccaatctcttctggctttttgggtttctgctgagaggtctgctgttagtctgatgggcttttcttcataagtgacctggcctttttctctggctacctttgacgtatttttcttcattttgacattgaagaatctaatgactatgtgtcttggggttgttcttctcatggagtatcttactggggttctctggatttcctgagtttaaatgttgccctttcttgctaggttggggaagttctcctgggtgataccctaaagtatattttccaacttgattctgttcttcctgtttctttcaggtaccccagtcagcggtaggttcagtcttttaacataatcccatagttcacagaggttttgttcattccttttcattcttttttctctaatcttggctgcctgctttatttcggcaagatagtcttcaagctctgatatcctttttttccacttggtctattcagttattgatactcgtggttgcattgtgaagttctcatgttatgttttttcagctccatcaggtcatttctgtcctctctgagctggtgattttggttaacagctcctgtaatattttatcatggttcttagcttctttgcaatggattaggacatacttctttagctcagtgaagtttgttattacccatcttctgaagcctacttctgtcaattcatccatctcagcctcagctcagttcagggcccttactggagatatgttatgatcatttgaaggagaagaggcactctggctttttgagttttcaatgtttttgcattgattctttctcatctgcatgggtttatttacctttgatctttgaggctgctgacctttggatgaggtttttatgggttctttttaattgatattgttgtcctggctttctgtttgtttttcttttagcagtcaggaccttcttacatagggctgcagccatttgctgggggtccacttcagaccctattcacctggggtcctcccacacctggaggaatcaccagtggaggctgcacaacagcaaagatggcagagtgctccttttccccaagaggagcaccaacctgatgctggccagagtgctcctgtatgaggtgtatggagacccctgttgggaagtctcaccgactcaggaggaacaggatcagggacccgcttaaataaacagcctggcttcctcttggcggagagggtgtcctgcactcaggagaatccgcctcatcagggctgccctgactctccagagctggcaggcagaaaagagtaagattgttgattcacgataccgcagccgcccctcctcctatgggctcctttcagggagatcagagttctgttcataaacccctggctagggatgctgaaaatcccacagggaggccccacgcaggtaggaggaatgggtcaaggttctgcttaaagaagcagtctggccaggaactgtccacagctgctgtgctgcgctgtggggaattgctcccgttccaaactgcccagtctcgctggcacctgcagcagggaaaaacggctgactggagcagcagtggtggtagccaccccttcccccaccgaactcggtcttcttaggctgtctccaacctgctacactggctgacagggattccaaagtgggtttcagtttgtagggttccaagggagcagggccgctgagcaaggccgcttggctccctagcttcagcccccttcccacaggagtggacggatctcctgcctccttagttttcccagagctagagtatgcaaaaactcttatgtctcagtgtctgcccaagtggtcgcccacctgagcagccgctgtgagcctgcacagctctgtgttttggacccaaggcccttggtggtgtgggctcacaagggcgtgggttgcagagatccatgggaaaagcgtgcttttcagagctgggtagcacaatacctcaccagcttcctcggctcagagagggagcaccttttgccgcacgcaggctccgggtgggccctcgctccaccctgcttttcctcactgtctgtgggttgcgccaaccatctagtcagtcccaattagagaacctgggtacctcaattgaagatgcagaatttacttgctctttttgttcttggtggaagctgcagactggagctgtttctatttggccatcttggctcaaggttcagtttgagtttctgttgcagacactgcaagaaacagaaccgaatgaacaagagatatgaaagtatgtatcatggcaataactgtttctgtttatttcttattttgttttattttgctttctaatagaattggaggaaataggaagtatttaaaaagtgtttaaatttaccatcaattattcctgtatagttctctatttttaaaaatatgcccccaagttttgaaattctgattcaatacggactttgaaaggatgtgaaatttgggagcacgtattgctgttactaagactgggggctgtgagagggcttggtgttcccccaagcagtcaggcttgcagagagaatttgtgtcctgctacggtcttttgtaaaggaagctagccccacctgttgttcaaattcattttgcttgcgtgaaagaggaatgctgtccctggaaacctctgtccaagtgcctgttttttctgttgtgggcagcattgcaaaagtgatctgtatcctctcagaaaaaggaaaaaaaaatcacatctaaaaatgttcaatgtcattacattgaacactgaccggacaagtaagctggaactgtatggttatattcacaaattctgggatgtttgttttggctttgtgttataattgcagctacgaaactaaaagtgaacaaattgctttctcatttaatttctttttatcatgtctaagtctcagtatttttatttgtagaattgtgttaataataatccacaggcttactatgaggaataaatcagatactgtacataaaacaaataggatatttgttgacatatagtattcattcaccagatgcttaatctttccttcctcttgtctatgttagcctgcgattgttattctagtgttggtctcaaataacttaaactgtcattagaattttgctttaattcatagggccaatagaggaggaggcaatggaaaaatcactaggtatgtttgcttagtctctcagatgctatagcacacaactctcagagacttggaaaaatggaaacacagagatgttgttttgtgttttgtttttgagcacagttcttatagtaaatgtgaatgtttactattatttctagggtttatgataaaagatggaaaagagaggctatactgatgaacgttgtcaacatgggggcttgtcagaaattaaacaaacttttaagaaagtaattgaatttaacaaacattattgagtaccttatctggcccaggcatggatcttaacctcaactcctcatcaagggtagaaagtagactcagtcaatgctaggcatggtggttcatgcctgttattccagtgcttttggaagccaaggcaggacgatcgcttgagaccaggagttcgagaccagcctgggccataaaccaagaccttatcgctacaaaatagaaaaaaaaaaaattagccggaaatggtggtgtgtgaatgtagtccaagctacttggggctgaggtgggaggattgcttgaaccgaagagtttgagcctgcagtgagccattatcacaccactgcactccagcctaggtgacagagccagatcctgtctcaaaaccagaaaacaacaaaacaaacagacaaaaaacagactctttctagtcatgactttattccagtgcttaccacctggtccttgccctcagagttcacaataaagggattctggtctgggaagaaagcaactttaaagaatttctatcatcattctcataataccaataaactccaaaaaagagcctaaagattttcaaatgaccttccttagaagttctagatcctagttgattacctgagcaaccatttgcctatgtgtatttcaatttaaattgtcataaacagctactcaaggaattgattaatctgaattcaaaaataacttttatttagtgaaagtcaaagcacattattgtgttttaaaaagtcaaatgttgccaactcatgacttagttaagcctggaatatgaatgtgcaattgaagcagacattggctgtatgcacaatgcctgctgtttttcttgctgttagtcattatatgttatgtcctttgtcaggttggaaacaaaagattaatttcatttggtaggcttttaaaaatgtgtttgtctggttgtgtgtgtgtgtgtatatgtatatatgcatatatacacatatatacacgtatgtatgtatatatatgtatgtatatatgtatatatgtatatacacacacacatatataaatttagttctgaaatttaggcatatatatatatatatatatatatatgaaatttaggcgcatatatatatatatatatgcgcctaaatttcagcactaaatattaaagtttaggcttaaagtaccaagatatttttttcagagatggattattttagcactaaaattcttctgagccttcagtattgctgagctttatttaggaaatactcagtgatagaagatgaatgcaaaaaaaattgattaaaaaccggagccttaaaaattgaattcccttcttactgttgatgttcttatattattttggtatctacataaatgattatttgaaaaaatttctgacatctgatgatgtgtaacatgccaaattaatttccgaatgttaaaaatcattttacttatggataacttcattatgtagaagctgactatctaatttgtaattatttttatagaaaaatggcaagtagaagcttatcatgggtgaagttaacaacaaaaggctaaaatttatttgtctctcttcagtctttttctcttcagtcaaagacaacttacacacaacaagatttctccttcttaattactacatttattatggtatttaccctgttcaaaaagccttagtgaggttccagctttgaataagatagagtaaacatactgtgccctgtctgtcctactgaatacaactatcaaacctggacaaaacacatgaattatattttcaaggactctgaaaagtgaattgtagcagacggactgagaaagaccagacctgaaaataaaacaaaaccaggcgtgagtttaccatgtttatcctctggaggaacccagctttgacttgggaagctcagaagtagacatcaacacaggcaggaagagcttcacctggcagtgacggtgacagcagctgagggtccccaggtttctaaagctctcaggacgagaaagtaggtcccaagataaggagcctaaagggcttttttctttctgtgtattccttcttggcctccaacatgggtacagtcacaagagcatgtaacagagaagaaggaatagacctaccattttctagataaagaattggaaagaggatccacaggtaaccaaaaagtaccagggaaatggcagagaaggaaaacctcaggagaccaacctcataagtggtatttattagtgcctgggctcaaatccaaattgtacatgaatatgtctggtcctagatagggtaccgaagactttgaaagtgaattttggtatatcattgcccagattccagactggctattgtgtgacacaacatacaggatatatctgaatagtgctcagaagagtttgaaaatgcaaatgatattaaaataaagatgaaaaagagaaagctggtcagaacttgtggacataacccttctggatctgttgcctgattaaaaaatagttgatattctcgaatgaattaaaacaagatttagagactgagcatggtagctcattcttgtaatccaagcactttgggagggcaaggcaagagaattgcttgcggccaggagtttgagaccagcttggccaacagtgagaccaggttgctaggaaaaagaaaaaataaaaaaataaaaagctgggcatagtggcatgtgcctgtagtcacagctacttgggaggcttaggcaggaggattacttgagctgaggatgtcgaggctgcagtgagcacatcactgcactccagcttgggtgatagagcaagacctaaaaattaaaaaaaacaaaaaacaagacttagagtctcataatattcagtaagtctagcatataatgaaaaattgctcagcatatgaagaactaggaaaatttcaacttgcatgggaaatccaacctacattaacactgagatgacagatcttggaattacctgactgactctaaagcagctgttattaaaatgttccaatgagtaagggcaaatctctttatatgaattgaaaggaagaaggtctcaacaaagaaataaaagaaatacagacattttatggtaactttagaactaaaaaacacaataactcaattaaaaaaaaactcattggaaggctccatgaaagtgacagaggaagaattggtgaatttgaagatagattgatagaaattatttcatatgaacaacacagagaaacatgatttcaaaaaaaatgaacatagcttcaggaagctgaaggacaacataaaaaggtctgatatgtatggctttgaaaatccagaaaggtagaaagagtgcagtgtgtgtgtgtgtgtgtgtgtgtgtgtatgaacatgtacacaaacgtatataaacacccttatgtttgaagaaataatggctgaaacatcccaaattagccaaatcacataaacctacagattcaaggacctcagaaaactcaaaataaacacaaataaatccatgcccaaagacatcataatgaaactgctgaaaactaaagacaaagagaaaccttgaaaaaagcctgaaaaaaaatgatatgttccttgtggagaaaaatctatttaaataacttcaaatttcttgtcaaatttcacagaagctaaaaagaaatcaaccaacattttttaaatgctggaggaaaagaactgtcaagtaaaaatattatatccaacaaaaacctcctcaggaattaaggcaaaataaagacattctcagattaaaaacaaaataagacaaaacaaaacaaaacaaaaacccaaagataccctctaaaaagtttgctgaagaaattcttcacacacaagaaaataaactgaagagcaagtttcatgaaagaacagcagaaatggtaactatataaataaatatagtacatatcatccttttcttgagttatttaaaacacttgagagtcaaaagcaaaaatatgacattggctgatacagtttttatccagtatgcatatttaatttaaatatctactataatataaaaggacctatatgatggtagtaggattcctgcattctacttgaaaaagtaaagtattgattctaaatataacatgaaaattaagcatgtatatagcaatccctggagcaaccaccaaaatttttttttgtatacacaaagagatacagtaaaaaacctgatatacttcggtggaatgctaaaaataatccaataacacaaaataagacagaaaagctaaaacagaggaataaaaatcagaaacaaccagcagaaaacaaataatgaaatggtagacttaaatccaagcatatctatacttgcattaaatgtaaatggtctaaagggccaatttaaaggctaatgattaccagaataaataaagaaaaatgtatgatgcagcaatatgctatgtacaaaaaatcactttaaaataatgacaaaggtatgcccaaagtaaaaaggtgggaactataaaccatgcaaacattaaataaaacaatactcaggttgctatatcaatattagacaaaatagacttcaaagcaaggaaaatgactgggaataaagatgacattaaataataataaaaagaacaatttactaagaagacataacaaccttaactatgtctgtagcaaacagcatagcatcaaaatacgtgaagtagaaactaacaaaaatgaaaggacaaacagaaatattcacaattatactttgaagattcaacagtactttctagaaaattgacagaactagtaaacagaaaatatgccttgatatagaaaagctgaaggaaaaaaccaactgactgaatatagttgatgtttttctcactctactccaaaacaatagaataggcattcttttcaagtgcacgtggaataatattacatttatgaagatagacctcattctaaataataaaacaaatttatggcaagttcatggaattgaagtcacacaaaatatgttttttgtccatagtgtaattaaattagaaataaatgacagatgccaggggaaaaaaattccgaacagtttgaaattcaacaatacacttctaaatactctacagtcaaagaagaagtgtcaaaaaaaaataaattatttcaaactgcatagaaatgaaagtacagcatatcaaatttgtggaatgtctgcaaagcaatgtttggaataaaatttattatgtaaaatgctcatgttatgagaaaataagttctcaaatcaataatataagcagccaccttaagaacttacataaagaaaagcaaaaaaaaaaaaaaaaaacacacacacacaaagcaatcagaagtaaaaataataaagagcatacatcaataaaactgaaatcagaaaaacagtagaacaaattaatgaaaccaacaggtggttcttgaaagagattaatcaaattgatgaacctcttgcaagactgacaggaacaaagataaaacacacaatatcagaaatggaagaatcaccactactgacaccatagcattaaaagcataagaaggttatgtgtttatttatgtataatagcaataaataattagcaagcacaacttaattagtaatttcacttaaaatagctttcagaatgtgaagcacttagacataaacctaacaaaacatgtacaagatatgtatgctaaaaactacaaaccctcatgaaaaaatcatagatgacctaaatgaatggagacatgtaccttgttcatggattaaaacactaaacttgttaagcatgttaattctactgagttgatctatagatttaatgcaactccagtcaaaatcacagtagaatattttgtagatatagacaagctagtgctaaaattcatatgaaaaggcaaaggaactagaacagccaaagcacttcttgaaagaaatggagaaattatgtgctcaattttaagaattattaaaaagcttcagtaatcaagagtctggtatcagagacgagatcagtgggtcccatagatcaatgggacataaatagacctgcataaatatgccaactcatctttaataaagatgcaaaagcaacttactgcagaaagggtaatgttctaacaaatagtaatggaacaataggaaacaattggtatacagaagaaaatgcaacctaatcctcacatattatgcaaaaagaagctcaaaatggatcgtagatttaaatgtaaaacacaaaattataaaatgtttagaagaaaatcttcatgacctagagttagggagtgagtttgggcatatctaagaagaaaatatatgtatatatttgataatttaaattggactttatacaaatttaaaacttttgctctgtaaaagacactataagagagtgaaaagataagctatagacagaaataaaatcttttcaaatttcatattcttcaaggggtttgcattcaagatatatttgaaaactcttaaaaatcaatggcaaaaatacaaagaacacgatttaaaagtgggcaaaagtcttgaacagattgtcgaccaaagtagatatggggaaggtaatcaaacagaactatgtgcaacatcattagcttaacttagggaaatgcaactaaaatgataatgccatagcactagaatgataattataaaaagaaaacaaaacgaaagaccctttcactaccaactgctggtaaggatgtggagcaactagacttcttatacgttgattatagggatacaaaatggcaaagctgcttgaaaaatgggttggcaatttctcagaaaggtgaacaaatgcttatcatatgacccatacatgccattccttagtatttatgctagcaaactttaaatttatgttcacaaaaaaccatatgtgaatatttatagtagctttgttcatatttgtcaaaaattgacaatcatcaaaatgccattcaacaggtgaatagaaaaacaaactgtggtatctgactacttcttgtcaattaaaaggaatgaattattgatttgtgcaacaacttggatgaatttcaaaggcattatacagaatgaaagaagtcaacctcaaaaagtttacctaccatatcatatagaatttcaacaaggcagagttatggtggaacgaaatcagtgagtgccaggggttggggtgggggaaaagtgtgactacaaggagatagcatgggaggttttgggggaactgatggagctgttccacatcttgattctcatggtgattatataaatctatgcatgtgatataattcataaaactatgatttatatgactataaattaattttaaaaataaaactagaagaaaaaagtcttcccaatgcttgactattgcttttagattatcctctaaactccatagcaggcaatgaatggcttccattctctggctacactcattttcccaacgtatttttttgcccagcattgttgtgaatctgttctcagtgtctcactcactttagtttttctctattccctaaagatccgagttataatatacaacctcaccaatgctgattatttgagaccagcagcatatctggagctggttaactgacagatgtgattggttggaactttacctaattcacccaaggcacatttggttttcaaagacttgaaaagggatcaatgttctcatctgtgaggttttaagacttttgtaggcgaggatgaatttcattctactgacaacctgaacgttttttcatgatttcaatacccctataaaaagataaaggcagctgggaatacttactctagaagaaatatggttgaaaggagaatataaaccattcacataaatggtaaataagtatttgtcatcttaactaaggatacaaaaaaaaggaagtgtgcatcaattataccatgatggattaattgtgctgtatggaaaaatttcctattaaggaaatttgtttaccttcctgaaaagtgtggctgaggttggtcacagagttgttctctagatctctttaaggatagattcctttttattttttaattgacaaaataaattttatttacttactgtgtacaacattgatgttttcaaatatatatacattatgaaatgactaaattttatcaaattaacatatgtattacattagatagttaccatttttgtggtgagaacactttacatttactcttttttttttaagaatacaatgtatcattaatgatagtcaccatggtacaataaatatctgtaatttattcctcctatctaactgaaattatgtatcctttaaccgacatcttcctaacacctccaatcagttcaatccaccattctgttctctcctatgagatcagcttttttagattctgagtatgagtgagatcatgcaatatttgtctttctgtgcctggattatttcacttaatacaatgtcctccaggctcatccatcttaattgcaaatgagaggatttccttctttattacagttgaatagtattttattttgtatatgtaacacatttcctttatccattcatccactgatggacactgaggttaatgtcatatcttgactattgtgaatggtgctgcagtaaacacggtaaacacggaagtgtaaaatatctctttgaaatacttatttcatatatatgtatgtatatatatgtatacatacatgtacatatatattcatacatatatgtatgtatatacatatgtacatgtatgtatgtatgaatatacatatatgcatgtatacatatatatgtatgaatatatatacatgtacatgaatatgaatatatgtacatgcatatgtacacatatatacatacatatatatatatatatatatatatatatatatatatatagtggtgggattgctggatcatatggtagttctgtttttaattttctgagaaaccttcacgctgttttccataatggttacactaatttccattcccaccagcaatgcacaagagtcccctttcctccacatcctcactagcacttgttatgttttgtctttttggtaaaagccattctaataggtgtgaggtgatatcgcattgtgacgttaatttgcgtttatccagtgattagtgatgttgagcatttttcatatgcccgatggccacttgtatgtctttttttgagaagtgtctattcagatattttgcccgttttttaatcgggttgttttgttgctgttgagttgtttgagttccttatatattttggatatgaaccccttatcaaatgtatattttacaaatatgttttcccataggatagatttttaaccgtttgggatggtttaagggaggccaaatggaaagcctaaaaaaagagcattctgtggctccatggtggattctggcatacttttttcaggatgctcttttccaggtcaatatttaaagaacttgaagaccgcaaagcttctgctcttgagatgagaaggagcttctcctccactaatgatctgaatttaacactggatcacttaaagccaggttcatttgcaaaatatttgctcagctttgatgctataaaagcctctccaaagctaaggaaaccctgagaaatggattattcatgtgactctgcagagcttggtatcaggcattgcttgtatttaatctttccctaagcattaacattctaagcttatgaaaaatttgtgacgtatgctaaatatattccatccagttatgatcagagtccagtcacctgagtgtaagatttctgccctttcagtgagaattgagagccctggtgaaggcagatagaaaagcccagaaacacttgttgttttatttatttttcattgagcctctggctaatttttgataaggtgtcacagatttaatcagttttagtttaaatagaagattgagaaatactatcttcttttcattaccattagaaagaaaccttaaagcttaattttgactgcatgaaatgatatctaacagcaaatatttgtaattggtgtattccagatacttgtagtgtaggaaatacaatattgttttctttaaaaggaaattgggtgtgtataaaacatcagaggaaacaaatttaaggcaagattctgaatgacagttctgtattctacaaacctttgctaatgaaagggaagatgatgattttcaatgtaggtcatggcctgaagtggagaatttctgaaattgtcattgcagaccctccaatcagcctgatctgtctctgcaacactcctgatgagctctgagccttctcagtgctatgagtatttacatcaggcagaggtgggttgggatccaaagcttacccaccctaatatgagtaagatgattctattacattcatcctagagagaatatccttcatagaaatagaggaagaaaaagcttgcatttggttaggaatatagattatgaagagcctccttatcctgaaagctgagataatatctgtatcatatgtggtaacaaaaaataaggttatttgtataaagaagttagcatataggaaggtatatagtaaagtgcttcataatggcaggaaggaaagaaatattgaaggaaaaatttaaaagacattgcgtcagttggtatctgtttttggcaagtaaacaaacaaaatatattttctcttttctgccagtagataggttaggaagcagctggaaggtaacatcgtgtctgacttctaggatatcacaccttcaatgagttattgttttattgttccttgggagcttccactgaacgtggtgttctgtcacttctgaaactctggggatttcttttcatgatagaaaattgacaactagtatttttttaatcatagaaggtaagaattgtgcttattgaccaaacatgtgatcaaaagtggttagaaagtctttagcaggtgtaccataaatgcctgccaccttcccatttccacacctccacagacagcttcttgtgaataccccctccacacatacccaaccatacatagtgttctctctgctaagaagaaaactgtatacagaccacatgacctcacctcactttcattctcctccgtacccaaagctgagactatggtggccagtcatttgtaagctgtctaggcacctttgacatggcattgtttgaaaagataagaggttatctttggggaatttggtatgaaggaacaaagcaatgagcagtgaagatgaaagtttatgtgacagaggctgagatagccatcatggggaatgatttaagctgaaattgtgggaaagtagaaagtatgactatgaataagtgtaatgtataacataaagacagatgatttataacacagagaaaatattacagatcagaaaatgaaaaagccaaaggggagagataagagagtggaatcgatttctgcgtaggtagagagtttaatataaagtagaatatggaatccttccatgttctccctcataaaattcacagaaacctcacgacttaccaaagatgccaagaggagcaggagatgctcttgtgtttcacccaaatatttgtttctcattttttttaatgaatgtgtgtattttctagaatgaatataaaggaatgcctcattcgtttatgtatttaaaatacgtcttgactaccaataatgtataacaacctctgctagactcaatgctaggtccagtgcatgcacttggaatccagggacccaacttggaagggctcacagtcttatgttaggagacagataaggaagcatatttatggggcacatgtgagattttgttacatgcatagaatgtgtagtgattaagtcagggtatttgagatgtccactactttgactatctgtcatttctatgtgttacatgctgtgatactgataaagacagggtatgtaaatgtgggagctcaaaggagggacatctaactccaacagtttgccagttgtggggaagaaagggtaaggaagtttcctcaaataattacatctgagcagaattatggcatgccagcaacctcagccaggtgaagggcaaagagaaacatttgcatgagagcctccagggaggtagagaatgcagtgttcaggaactacaacaacaacaacaacaacaaatcaagtattcctgggccacaagatgtgagagggggaatgatgggagatttgctggagggcagggggattcaaataaaagaccagcacacatgagctggtttgtgacctactacatagttttgacttgatccttacaacatagtattttaagttaaagagagagaagttcatatttgcagcggggaggtggataagtggttgttgagacattaaaatagtagagtttactggacttggaagacttagcactggacttggtaacttagtaccttgatttctggcatctcagtgagttgaggccacatgacaagtaggaggaagagcagttattatcaagagaatgcaaatgactgaaatgttgagttggggtttctatgggatatactggtagatagcagagtcagtagtaagatacaaataggtctgagacacaggagagaatctcaaaagggatattaagcttccatctctgtaagagccatatggttgggtagttggtttgctttgtgctatacaactatttgaagttctttacattttctttcctcctgttttttttttttttttttttttgaaacaagatcttgctctgttacccaggctggagtccagtggtgtgatcatagctcactgcagcctcaaactcctaggctcaagcgatcctcccacctcagccaactgagtagctgggactacaggcatgtgccaccatgccccattaattttttatttgtattttttttaaagacaggggtctcacggtgctggccagactggtctcaaactcctggcctcaagttatcctcccacctctacgttttcaaatctaaaaaaatagtttaggacgtattcaccttagagatttaagagtttatattttagcaagctgtaaagtccagaaatcaaattgtgagtgggcaaacaaaatcaaagcaagtttcatctcatttagaaatgtggaagaatgagaacccttagtttaccttgcttttgtgcatgcagagtgctagctgtaatgggttagcacaaaaagacaaaatcctaaatcacagtcactttgccataatttttaatagttatgttctctcatagttctatggatgacatgctcattatagacagtctgaaactgaggagaaccagggttcttcctacatgtttatgttgaatgtggagaaggtgaggttactgcttctgctgcccttttcagctcaacatttgatctggccaatgtggttagctatactgtgtctcctaccaccacacatactcagaaaactgtggtagtaaacatagaatgaacttccttaaaagtagaaaaccattcattggctaaggtacataagaataagaatgaatgatgaaaacattggtagaaatgctgatggaagaactgattgatgcagatctattttggagaccccttaactgccaggggacatgaattgcctggctggttgaattgactctagaaatgatgctctgtggccgctaagtctccatatttgaccaaaaggtgtgtgagggctgtgtccatttcatcacttgccatgagtcctcagggctagtcagaataccaggccgatacacgcttcacaagcatgtattgaatgagtgaatgagaaaatgaatacaataatattttcactagtagccatggattgaggataaaattaataagaagagcccccaggaagtccggattgagctttatgctctgggacactcttctgctcagctttgtggaataatttgcagcactagaaatggacttaacaaccaggatgagggggtcatgttttggggatcaaacctcttttcatcatgaaagctactgggtggcctctgacatgatgtgtttagttatcaaacatgtcagctaataccatggagagaacacatgtattaaaagtgacagacataacaagggtcaaagattaaaggtgaattgcaaagggctttttactgcatctctgttgttataacagtttctagagtaggttgaatacatgagcaaaaagaatgatgaggagtcatggtgagcagaagctctcttctcaggcaaagcaggaatttttttccccacattgagctaaatattctttaaatgctataaatgttactacatatctgtgctgtttgtgggacagcacaaacatatttgaaacattcagcagttctttctcattaacttccatttttctaattttcattggttatattttcctgattacagaagtagtattggctcattatcaaaaataaatgaatgaaaaaatatagacagttaaaatgtgatataatgtaatggcctaaatatgacattgttaactgtacattcctgcagttacaattgaagatggcattttatcccttaatcagatacaaagaactgttagaaaacttcctttttgcccaccactgcattgtatactgtggtatatatggaaattcccaatacagacatggaaatgataaataaacacaaggggaactctcacggcataactctgtgtctagcaggctaagataataccatgttgtgcagtggtggtaattagagcacatcacgtgactctgagtttttgagggcagtggtcaatatctttatctttgtatccccaagggtgttggctaaaatgttcagttagcactttgaatgagggaatgcttattgagtaaaaagtcaattacatgtgacaataaatgcagtaagaattagtcaagagaaagacaagtgtggcctgcagtcaccaacagaagctttaagctccaaggatacccaaatgcgtatgttaatcatgtgttattgttaaagcatttagatgatgatgtttggaagttgtgtgcaaaaccaggaaaaatttgaccaagttttggaagttcctttctgtttgatttatctgctgttatggtgttagggctattgctgttttatagatcagttctacactgtagtaattaactgggtaatgaagacaaaaagtatttagaaacactctgacatatcaagaaattagtgtcaccaacccagaggcttctctgtctcttcagcataatcttccatctcaggtatacctaaacttgggtgtttactgcctcaaaagcaagcatttcccttgaaaagcagatttctttctttctttttttttttttttttttttttttttttttttttttttttttgagatgagtctcgctctgtcacccaggctggagtgcagtggcacaatcttggctcactgcaacctctgcctcccgggttcaagcaattctcctgcctcaacctcccgagttgctgggtctacaggcatatgccaccatgcctggctaatttttttgtatttttagtagagacggggtttcagtatattggccaggctggtctcaaactcctgacctcaggtgatccgcctgccttggcctcccaaagtgctgggattacagagagaagctccagcttttgcactagctgaatgttgttatacttcctcaaacatttgaggataaagacataatatgtgatagttttaggtgactttttgtgtgtaacatttgagctctgaggataataatatatctttctatataacacatttcaatatctatttaatgtgccagttgcaagaattttctgattgacattgatcattttcattcagaattaagtcatttccttctgggaattaatataatagatttattatatgcttatgggccttgtctaagctctcttctccacactgtttcttcaaatgtaattccattgaaaatctagctgctgttttagagattacagtaaggcaaagcatttctcagaagacaaatatagaacctaaagttactataatgacatttggcaaattatataatctgagttcattttttttctcttctctccctcctcccttgtcacaaagcctataggaaggtatactacatattttgacacttttttttttttttgctttcaatagctgtgttcttactcaccactttaaaataacgtctttcttatatcttttaactcagaggtatactcagagactggaagacttgaacggggactggctacccagatagagcccccttggtggtgttttccttggtgatatgatactgggccgtattccctcaggattgcagggtgagaactgtgtctttgctagcagactaggtaggagaggatccattcctcagaatcaggttcatgttaacatagttcacatattgtattaaatacaaaccagaatgccaagttttttatttacaatgagcaatatagctgttaaataggctatggcactcaagtcaacaacaattcacagactcctctccccatagagaagcaacatggggatccaaattgtaatcagaatgccaagttatcaatttataatgagaaatgcatctgtctgacgagaatgttgagttggcctgataaattcattgtctccctgtagattagtgacaggggatgccaaattttcggaaagttgcgagagaatatggctttaaaacaatgggaaggagttgatcttaatttctgtcttccaattaagatggttttaacattcccacctctacctggctggccttgccgagaaaacaatactgctttagtcaaacaatactgctttagtcgctgtgaccagtgtgggcaataaaatgtttattttctgcctttcctttttctttgcttttctcaaccaactacctctctccaaaaatgtgtatgacataattgattgggcttttgtctgtcatagtattgattcatcgagcctcaatcatatttcagccttccagccctagaattactcccatattattttttactggtgtctgggctatgttcatatgtgccaatcaaacatgtatagtttactgacctaacctcacatttgtttaatcatatcctttatttttaaattctgtaaatcaactcactgcagtccttggcactgaaaatacctctatttcttcactacatttcctgaagtggcaaaaatgccaagattatatgagacccagggggaaatatagtgttctctgcccctagtgtttaatgcaaattgaaactaaaataaggcttgctttgaaaaagtacaaaaataaattttaaaaaatgctaaaagctggattcttctcttttggagatggcaaagagatagtaaagttgataaagagatgatttgggaaatgcaggtactttttagcattagtgagtagactcatttctaacatctcctggaagtatttgtgaattggctccagaatcttttgctatcacctaccctacaattaactagggatatgcaatcaccaaatacagtttctgggacaccttcaaagatgtcagcttcttcaccataaagatggcaaaaagtagaataattacattctatctttgacctttgatgagaaatgatcagtttctttttctaatccaatatggcaagcacttctaattcgtgtgaatagatctctttatagacatagtgtgtttatatttaaatactaagataatctggaattctgaagctacaactgtataatgacattatacttggtcagctattgcttttcttttcccatttatttattttgcattgagtcctacactggtgaaaggcctggtgcgttgcattgagttctgcatgtttgaacttcacaaaggttcaaaggtgtgcacatggcctggaacgataaacatttgtcctaaagtcattcttcagcttctgacatagcttgtgatttaattgccacctcattaatatgggccactgggtgtgaatttgtcaaaacaagatacatcaggagagctgagtgaaatgtttcatgttcagaggtttttaccactcctgttccccactgcccatgttttgtaaacttttaacttcaagagactggtttaataaacatgccctgtcttctaggtcattgggttaaggatcatttcagtctttttgaacttttcacttttcctgtgtaagtataagctaagtacttattgggttctaaagctaaaagcctatgaagataaagggccttattgaaatagtgaagtgagcaaaatatctttatggttcctgaccttgtcctcctgggctttgtccttcttttaatgaatgacaccttaccctcaggttcccagtatttacacctttgtagtgtttttgcaattcagaaaaatgtatttgatagatgagtagggtgactgtcgtttacaataatctattttctatctcaaaatagctaaaagagaatagtttgaatgtttctagcattaacaaaagacaaacatttaaggtgatacatattccaattataccgacttgatctttacaagttatacaaatgtattaattcaccacgtgtagcccaaaaatatgtacaactattaagtatcaatttaaatttttttaaaaggacacagtgaaggaccatacttaaacttgattatttaattgctcatcatgaaattttatagggaaagaagaagaaaatcttcaataactcaaactcataagtaaagggacatacatggctgtatataaaggctatttataaagccctctatataaaagttatacatagcctataaaataaataaggatctgactttatattggtacctggcacaacacatgcattgcacacaggaaccactccataattacaattaaaattattatacacacaaatacatatttacttcttatcaaggtatcacatgttaatgctcacatgaagcagtatcaaaataccgccaatgagttgtagaagtctcttgctctattttcctcagtggcattctcactccctagtgaagtgtttttaattatttttatttttttatttttttactggctattttagactttctggtagagcactcaataatttctggatctgtcagagttaggcaatccactctgcaattggcaagatggggattttgctcatttatacttgactctccttcttctattaatcttctccttctatttatataactgtaacatagctgcaagctttaagtaaaacacgtaaagtcattttcttgttctgatgacttgcaatattttctctttattccccacgagatgaaatgaggatcttggtcccatacgctttccccaacttcttctcactcatttcaggccctacttctgtcaatcactctttctgtgtttagattgttgatatttgcacgttctgctaaaaatacaatcatctttgcccaaaggttaactttaaaagtagaacaataaacagtattaacattattatggccacataaaaatcatttaatgttaggtaaaaagtatgttaggattacatttttttaagagaccaatgtcatgacctctaactcactgaaaagaaaagattcctagcatttgagttcaaataaatgtttttttccttatatttagtcaattgcttaaaattaagctgcatttcttttatgtattctattttcctgcatcatatcttcatatatatttttttactctctatcatattatctagtctatttggtctgctttcccccactccaaatatatcccccttctagagtcgtctttctccctactccacactggacttacaactcctagacatcgtgctgcatcgctaatgtcctaagtttggtgttattggtgctatcaatcttcttggttagatctgatattttggtagcttcctattttttgaattatcctcttgttttattataatacatcctaaagtaacttcctaagagaaagcacacaggaggtaaatgttctgtttcttgcatactctcatatttgtgtgaccctttggccgacgatagaattctaggttgaaaagagttttcctttcgaaatttgaaagctctgctccattgttgttgatgagaagtcaagtactagttttattcctcctgtttccctttaaaaacttttaggagcatctcattattttaggtatttacatgttttcgatgacatacttgagaatcctttttgcacttattacaatatacactcaaggaaacttcttggtttatagattaatgtcttccattgagctatgggaaactttatttctatcttttctttaatatgttctcgcctccattttctctcttctctttctctgacttttaatatctggatgttagatcttccagacttatcctttctcatgacttctgtctttatactttagtcaaattagtgagagtccctttactgtgtttactccctctacttttctattttgtttattccaacaactgtgtttttagtttctaagtagtctttcttgctctctattttaattgtccttaccttctgtttttattttttggttataatagtttctccaatttgtgtaagtttattagagtatcttttgtctttgttcatttatttcttacactattcctgttttcatcttgcctgtcttagtctttatccataatattgccagatctcctaatatatttattattcttgctggtctatttgtatttaagggaaacaaaaatggcagactgcttttttttttatctaatagaactatttacacttaaaatctttatccttagtgagaactgtgggaatagaggaaacagagggaggggcaggtgatccaatatattaaagaggtgaaatttggcatcaatgagcctccaccataaaagaatgtgaaaattgctattcccagatgccaacatctaactaaagccttgcttttctactgggaattagttcaatttttttagagaagaacaaacaataatttttgttttgctttgttttggtttttggtttggggggttgcatgattattattttcttggatgattattattatttgcttgtaattgttcctgctgtttgtttcccaatatctcaaacggagatatttggctgcacaggagaacaacatatgtagctgtttcatacatggagcttacattgggttttgttttcagtcatatcttttatttctacccttggactccctgaagtttttgttattctttttatttctgccaaatctcccaccaatttcgtagtcaccttatagcatattttagactctggttttctgcctgttacgttttaaaatggagcagtaaacacaattatgaccacataactaagttaaaattgagtcaaaaagtgtgctaagattaggttttagatttttttttactttcagggaccaatgttgtgaacttcccatcacctatcttcatcttcatcccaaaatagcacaccctttcttggttattatgtacttcttttgtgttctgctaaactattatatactatacttatgctttcaaaataattcatttatatataattaagttttgtgtaaatatttaacatataaatatttagtagaatctctgaaaggagtgaaggcaaaaactttcctgacccataataattacatacctagagcatcacaaaatctattatcaatgaatggattctgaattctttgataacatgtctttaatttttaggatttaaagtacctcctttaaagcaccagaccagtagtcaattattatgatactcacctctgatattgtcttatccctgagtgtgtaataaacttctggtccctggaatttctcttccctcataaaactgtttctcaatgtatcattttgtgatgacttttttttctgagcttcctttacctacccaataggtacacattttttcccaagatgctacaacaataccagacaattccagatattcccgccttccacttgtgatctgtaaaatatatatactggttggttatgtgcaatgttttatgccctatgccctttcactggtgatgttttaaagcaagcattgtagatgaccatgaattatagcagacaggttcccagtcctatgctgtttcctaatgtacattttttctcttgtcacaactaggaaagtcacgtttcagtgttttggttttggtgaatgcccacaacaaggctagtgaaggaaggaggcatagtaggaagctgttggccagacgagcttttagaagacccttgctacatagagaggacgtagaaaatgtctttatcattaggtgagaaacatgaactgcattctttgttgcgtcatattaaaatgtaaatcacaagaataaattataaaaataaaacctaaccaaaacacaaacaggaggaggtaacagaggacagaacagagttcctagaaaattatattacaggacagacatacaagtacccaagagaaagcaaaattctaaaagtctcttagccaagtgtagagcacaaaagttctcctcagttcatgcactttcgaggcatgtcagttggaaaaagagcatgctataggagacagttttattgtgttttgtgcagtgaccttttaaaagggaaaggtcctttctgagatattttgagttcactcatgcatctgtcatagaatttgcttggaacgaagtgtgcctgtcaccccaacctttcttcagagcagagcctgcttcctcatgggaagaatgatgttttaagagtgtcattcagatggaacagaaagaggtcttctccaggtttgtcttgctactgaatcaataggatctcctggattttgaaaagtatattaaattttttttcagacgtcagagttggggggaactagttttgtttagctttatacaaatttctagcattacttgtacggatatgctggagattctgctgcctcttgcaatctgacagcctcatggagagttgaataaatggtcattgcctgggtaagtgagggctctttctaaagtgttcaagagtaggtcacatagagaggagtgccttcttcctgcattttttcaagtacctgttttcccctattttattcttttggaagggattgattttatggtagtccctttcttttctcacctcttgacagaatgtttttctaaatgattccttcagattattctttaggtcccattaaaagaaacatgctggttcttcattctcattctgtctttatgcttaatgcagatataattcatatttgttttatcaaagtcatttgataacctcttcaatgacaaatccctgattacagatgtattctcttttggtaacccacaggggttgaaattgctctaatttttggtactgtgtattaggttgagattaaaaaaaactttgaggacaatcttttccttatttaatatctggagaaaaaatactacatgtgagaaaggtggaaaaaggatgttgcactgtatgtaataaaagctatgaattttggcacttttgtaaactgtaaagatgtaaatgttccttaattattttcagtagtcagacttatgtttcttccagttgtatttccaggctgagacaatacaaaagatggacagctctaagttgattatcaagctttaaatatgtttcacttgattaagaacattgaaggtgagaatggaattatgtaggcttcactgagtatccgtaaagttgggaacaatgatatacaacacagaaaagaagctccataagaaaacagctgcaactaacccatctggaaagagacctcaatcaaaatgatacttagcgaaagaaaaatactttcagtgatcaaattatttgtctgaccaatgcttggtggaaagattccacattactagttatttgtaatgggtaattgcacaatatactgtattgttcaatctggtgtgaatgaaagtggggagatcttgacaattgtcttggaacaatagatgtaaaattgagactattctgggaaaaccaggatgtttgggccccctggtaatagtctaatcattatacatctgtgctataagcacacaaataacatctagtaatgaaagaaacattcagctaagaaaacttgcagtcaaaaacttttgataaagctgtgaagacttgttaggtcatgtattaatttaagatctttaagatggagagcatcccatcaatgattaggagaaacacaaacattttatattgtgtttaatacacttttttatgtttaataaaaaacatatcacctaccctacaactcataattaacttatataaagttttttttgtttaataaacatttcatattgtgtttaataaaacgcaaacattttattacttacaggtcctgggtgggggcagtacgtggcatgcctggagatgacacacaaggagatcaggaagtgtgggcagggagaatgtggacctgggtcacttgtatttattggagtccagggtgagaaacctaagtgtcatgggacgaggggagcaattgggcagtttaaaacaagcaggcacaaaatttcaaacaacccaacattaaaaaccctttctggcaaagaaatgttatctagaaatctagctgacccaaaggctgagtgtgtgggtttggggtaagagctatcttgcctcaccagagcaacaaaaaggagaagtcatcggctaagctagatagccaaacaaaatggatgctgaggcaacattaaattataagaattataaggtcaagatgggatggagattctggacctggtacaaggaagtgctgcaatgaatagcagggagttagggcagactacttccagtgtcctgagttttcaggtttcatttggctgtcaaaaccatttgttccctagactgtgatttgactggtgatgctggctggcagtgcccctactgatgacttagcagatgactctgagctgacaatttgccatccttcagctgtcttggtaggagggattcagttaccagcatgcacagcacagagcagaatccaacctcatagattttcaaaaacttatcgctaaagtctattattaacagcttggtaagaaaagtctttttcattgagaaatgtatagattattgtgaaggaaaagtatttgctaagaccagactggccgaagctaatccttttgggaatagccttaccaatttgggggaaatgactcatttacttataagctatacctgtcagcttccctttactacctttgacagctcttaaaccagcagtataagaactgctagtgaaaaaataaacattagtataaaactttatgtacctattacataacagtcatatattaggtgtccattttaagtacagatactgaaatagcaaaataatttattggagaaactcaaaatgctatagaaaaatttgacttggaaagcaccacaaatgtacatgatacaagtaaacttgaagaaaccaattacattgggggatagtcttgttttctgttattctgtggacttgctttattaatatatggaatttagagtttcttatatttaaaaaatatgaaaatgcacataatcattcccaggctgctcctgatcctttagtgatgattcctacagaaaaaaaaaaagtgcttgggatggggaagaactttgtggccatcgattttttctttctttctttattatttttatttttttattatactttaagttttagggtacatgtgcacaacgtgcaggtttgttacatatgtatacatgtgccatgttggtgtgctgcacccattaactcatcatttaacattaggtatatctcctaatgctatcccttccccctcccaccaccccacaacaggccccagtgtgtgatgttccgcttcccgtgtccatgtgttctcattgttcaattcccacctatgagtgagaacatgtggtgtttggttttttgtccttgtgatagtttgctgagaatgatggtttccagcttcatccatatccctacaaaggacatggctgcatagtattccatggtgtatatatgccacattttcttaatccagtctatcattgttggacatttggcttggttccaagtctttgctattgtgaatagtgccactataaacatacctgtgcatgggtctttatagcagcatgatttataatcctttgggtatatacccagtaatgggattgctgggtcaaatggtatttctagttctagatccctgaggaatcgccaccctgacttccacaatggttgaactagtttacagtcccaccaacagtgcaaaagtgttcctatttctccacatcctctctggcacctgttgtttactgactttttaatgatcaccattctaattggtgtgagacggtatctcattgtggttttgatttgcatttctctgatggccagtgatgatgagcattttttcatgtttcttttggccgcataaatgtcttcttttgagaagtgtctgttcctatcctttgcccactttttgatggggttgtttgtttttttcttgtaaatttgtttgagttcattgtagattctggatattatccctttgtcagatgaatagattgcaaaaattttctcccattctgtaggttgcctgttcattctgatggtagtttcttttgctgtgcagaagctctttagtttaattagatcccatttgtcaattttggcctttgttgccattgcttctggtgttttagacatgaagtccttgtccatgcctatgtcctgaatggtattgcctaggttttcttctagggttttaatggttttaggtctaacatttaagtctttaatccatgttgaattaatttttgtataagatgtaaggaagggatccagtttcagctttttacatatggctagccagttttcccagcaccatttattaaatagggaatcctttccccattttcttgtttttctcaggtttgtcaaagatcagatagttgtagatatgcagcattatttctgagggctctgttctgttccattggtctatatctctgttttggtaccagtaccatgctgttttggttactgtagccttgtagtatagtttgaagtcaggtagcatgatgcctccagctttgttcttctggcttagtgttgacttggcaatgaggactcttttttggttccataggaactttaaagtagttttttccaattctatgaagaaaggcattggtagcttgatggggatggcattgaatctgtaaattaccttgggcagtatggccattttcatgatattgattcttcctatccatgagcatggaatgttcttccatttgtttgtatcctcttttatttcgttgagcagtggtttgtagttctccttgaagaggtccttcacatcccttgtaagttggattcctaggtattttattctctttgaagcaattgtgaatgggagttcactcatgatttggctctctgtttgtctgttatgggtggataagaatgcttgtgatttttgctcatcgattttgtatcctgagactttgctgaagttgcctattagcttaaggagagtttgggctgagacgatggggttttctaaatatacaatcatatcatctccaaacagggacaatttgacttcctcttttcctaattgaataccctttatttccttctcctgtctgattgccctggccagaacttccaacactatgttgaataggagtggtgagagagggcatccctgtcttgtgccagttttcaaagggaatgcttccagtttttgcccattcagtatgatattggccgtggatttgtcatagacagcgcttattattttgaggtacgtcccatcaatacctaatttattgagagtttttagcatgaagcgttgttgaagtttgtcaaaggccttttctgcatctactgagataatcatgtggtttttgtctttggttctgtttatatgctggattacatttattgatttttgtatgttgaaccagccttgcatcccagggatgaagcccacttgatcacggtggataagctttttgatgtgctactggatttggtttgccagtattttatggccgtcaatttttgaccctgagagtgaacctcacctttggaagttactaccaagcatttgacttttggaagactctttacacagcaagagatctcctccacctttgaggtgaggacattaaacttggtttaaaaaattacttttccaagtacattaactatgtcttatatattatccatacacgattactaagaaaatataaacattttttcatatactggttaattggctttaaagaaaaaaatcccctttttaatcccatcaggatttagtttgacaaatttttcagaaacttataaagatgaaaacacctggatgtatttctctgtaaactttggctgttagcatcctttttcaatgcttgtgtagtttttcagaacagaacctaaccttcaagatgagtcatttgttcccaaacttgaattgtcatgaaacactccttgggtttccctcccgtgctgaatatgatttctaagaatgggatggcatggttactgtataaagatcatttgttctacaggtcagaaggcctgagttctcatcattaattaactttgtgatgtatgttgggtaaatcacttaacctctacagttttatcttctgtaaaatatgaaagaaagactttgagctaaagtttgtttctactgtaagaacatgagatattttatcttggtgacatcatggcttatgggcaggctgaggtgggattagtaattgcaaaagcagtggtcataaggtgaagaaacctggacatgacttcagacttaacctgggaaataaaatcagggaatgtggacaaagtcagacactactttagcacaggatgagatgccagaagatgatggatccaacaaagacatgcatgaaaggccacggggctgtttctgggcttaaacaagctagtcttaattaggagaaaaagcggagggactggaggagtggaggagaggaagtcaatagtgatgcagtacttccatcctagagggtttcttcgagagccaagagttccaatctgtgcatggcattaccccttctgaggtaaaagaaaaagtcctctacaaaaacctgacagtattctgccctcaagccccttgttaaccaggccaaggtgaggcatgggtttcatgccctactgatagcagtgcaagatgtcttgttatgagtattgatatcgaagtatgcttttaaatcatatttcactctgacaccgttagctacgtaactaagtcttagtgctattgccagtggtccaatctaaatgatgtagtagagaatctagttcattactctgagctgggactctgatgaagatgtagggtgacacactgtctttgtgaagaaggcatgtgtggaatacttggtgtctttggtgagatggcagaacttaaaccgtgaggaggatggcaatcatgaggaatggtatcaggaagtttttccagcttgatagatgggaaggaaagcagaatggcaggaagggggccaggtgctatctccttgaaggagggatgaaccgtcctcagggtctgtctgctcacaggcaggagacttataccagaactgtgtttactggaagtcttttagagttcaaagtgaacttatctgagtttgacaaataatcccctacagcaagacaaagagtagtagatgaattatacatttggatactgttggaaagggagaggtaaaatccaagttggaataaagcatatgttatgggagatcatcaatatcattgagcacgggctttgaggattagagttatgatgaagtataatagtacagaatcagcttgagacacagtcttatgtttgttttggtcatctgcctagaagtaaggtgcagaaaatgcttatactttgaaaagtcgtgaattaaatagaactttctagcaatggttgatgaactgggtgggtgtcaaaaatcaagacttcatgattgggaagctgtggggatggggaattttcttagaaaagagagagactctaaatggtgctagtggggtggcctaagccctgacagtggaatgggacctttttggaagactgcacctcggggtaaggatgcttgtgaccctgagactagcatcaacccatgatagaacccaagggtgcagaaacctatgatagaaagcaagggtaccaaaaccttgagggtgttggcagactgaggggcactcagttcacccagggacatccttcacctgagaatgacttttctagatctccctgcagtggttttgagaacctgagtcctagttgagccttctgtgatgccttccaagtcctagcagtgtggcgtgcccacacatctttctcaacaaaggatgcagaaataggaatgtaattagagcagttcatcctcggtagagagtcctttgtggttcccagctgggcagtagtttaaaggatagccctgtgaatctactcaaatagtatctttatttaagatgtcaataaaaggtagtaaacttgagaatctctgagaagcattgatccatagtggaaattacatgtatttaagtatgaaggtagtaaatatatattaacaacacattatatgccagatactgtcctgggtatgagctatagctggaagtcagagcggtacaaaatctaccatgggggagtttaagaccaagttttcaagccaaacggaactggattctactaatttccagactgatgccttggagaggttacttgaatttttctgaatgtccattttctcatatattaaatgaccattataaccttgctctgtaagactgcttgttagatgatataatatctttcaaatatctgttaaagtgcctaataatagcataatagctactcaataagtagccataattgttttaacaaatgaaatttagactcctaggaaaattagaaagtactgcactggctttcctgttttcctaatggccatgattatttatccagtgactcagtgcagattttgatttattttccttttcatagccaccttatcaaaaagtcctgctactgttatttctacttcaaaatgcatctcaaatctattcacctctctctgttcccatctgtatcaccctagtccaagctctcttactccctagagcaatagccggtaaccatgtgcttacaacacattctctgcaaaggcagcagagtgtattttttacagcatatatcagaccataagggcctcttgcttataaaggaccagtggatttttattgcatttactatccaaatctgaagttgccatcataaccagacttctctcattctcttccatgtcttctggtatcacattcctgcactaacctctacaccctgcgtcctcccacctcacctcagcttcaccgtgttctcagtttccagcacgcaccaagctctgtgccacttcgaggcctcacacctgccgatctctctgcctatgattctcttctctatgctctttgctgaaccacctccttcttatccttctgccctcagccttacctcaaccagcccatcattctctcagcctccaccgtagcacttctcatgactggtgcttgcttatttacatgttttctcttgcgcattggccaccacaaaggtaaattcttatctgttgtgtgttcaccttggaatttcccatccttaactcgataggaggctcttattaaatatctttgtaaataaatgatatttttatgatagataattgcagattacatgattgttcagttgttaactctgtgcagtcgtagagtattctggttttaaagattagcacttggtttatatgtgaatgaactttcaaaattagacacgatcttctcagttttcttgtcaaagactgtttctaaagatttgcatgagctagtctggtcctggctatcttcctatcagggatgcattcctgtattggtagattctgtagattaactttctaaatcattcatggcccttccttctgcgccgttaactaggaagtataaagtactttagaacatttcattattagtattcccaatatgaccgtggaaatgtgggcagtgggatgaggcaatcaaactgaggttttctttcatgataactatttttgaaaactacctgcagtgagaaagaattctcaagcaggtgcagtggtgtttgagagaagcataaatggagtggttgagcccagaccttggagtcaaataaacctaggtttgcatctcagctctgttgcttacaagctatgtatttaaactctctgatctccaaagtggttttggtgattcaattagatcattcatacaatgagagtcttaacaaatggtaagcatttttaacttttagaaaaacacaaggcagttagtagacgaagtgtatgaggacattgctagcttaatataaggttctttaagggtaaaataaagagaaagggaagaaaggcagagttctttcttttttaacttcttaaaccttttcttatgaaaagatatgccacataaccataattcatcctggcaattaggtaaacagtatacagaatatgactctcgccattaaataaacttaagcaaggtatctttatcctgaaggaattcttagagatttcatcatgagtaagcacttttcagtatagaattgccaaaatacaaaagaacaccagagaaccactctaacttctaaaaaaaataagaaacccaaaaccttgtgattgaaaaaaaaaaaaaaagtaagaaaaagaggcccttagtcattctgttcccttttgggcctctatctttcatttcctctggggaaataaagttataaactgtgctggcagtaatctagggtgatgccaagtcagttacccacccccaactccatgtctccaaaagattctttaccaccctttgactctaattaaagaaaacaaatgtttccagttttctgtcatgtacctttccactctgaattatagaatagctttcttgaaattcttttaattgttttttacaaaggattagcattaaattcatagataaaaataaattagtaatagtgatcaaaatgacctaactccactttgtttttacttttcttctgggtaggagggcaaataacataactgcttatatggtgatttattttaaattgaatctgaatttctatttcttaaggcctcattggcttcatggcaaataagagagttttaaagaatttattgtgttaatttctgagaaaccaggagtttactgttgacaataatggcacaaattacaactcctacacagctctaccccctccacttttgagtttcaagacttttgccaaagttttctggtctttgttcacttctattattaacatctcttgtgtgaaggggaattttgaatgaatgggatgaaatcatctaaaccagcttcggtcctaaatatagtgtctggcatcaggtctgggaaaaaaaaaattggtcaaagagatagcctgaggttatttttaggaagttggatgtttagggaaattgatactatgaaagttctggcctctatctctgaagatattccattgagagatacatgcatgcattcaacatctcgtttttttccattcctgccctttgggtgttccgcgtcattcactatcttgtcattacagcattaagcagaagcttgaggcagaagatagctaatgcaacgtttccatttggtcctgtaatttttctgcacagagctttataggatttcatttcgggttaataaggggaagttggaaccgaggagaaagcttatgctctgccaacatatactgaggattactaaacttggaggtagaaaatagaacacaggaataaaaatggaaaagtcctggcagatttctccgtagcagacttcatccttaaaaagcagaattccatccagctcttcttggtggcataattccttatcatggaattataagataaatgctctgtttttatgcgtctctcttttctaaagttgaattgagtgtctgaaagacagatgatgtgtctaataccaccgttgttttacagaagggaaatctaagaaaactatagctaccctcctgggaaaacatatctaggcatttgctaacagtcatttaggctgcatctatgcacttccacacagaaggataaatgtcacatgttcgttgaatgatccagatgtttcaaatatacagttgttttatatttggtaaacaatgcagttaggtcatgtaaattttaatttttcatttggagtttatccctatgcaggcaatcatagattagaaagttatttttttcatgtcctacctctttgaattgtcaggttcttttaaatgctgttatgtagcaataaataatattttatccataatcaaggtggatgacttactggatatcagatattattattaacaaaaagtttactacattgtacaagtatcactagacaaagacaacctctagaaagttaattaaggtaactaaggttctcaactgcaaccacaaaactttcacagttaataataatttcacagttattaacataactttttcaagaggtactatactaaaccaaggatgctaaatataacttattaatttctgtgatggcttctggggatatcaatattggtatactttcctcactgcaatgaagacacttctgcatctacttttgagatttttttggtcatctttctagcagccagctgtcacctcttgctgctgtaacagttcctagtaatagttcccttattcttcaaacctgatgttagcagggaggtcagatactcaagcatgattagaattgtagaagcttgagcctcatatttaaatgtgtgtaaatatatgtttgaaaaagaattaatgagctcttaattgcagatcaaaggatatggtttgatagtgaagtggcccaatgaaagttgtttgaattttccttttgtctttctgtaaatggaactgtgttcttgaaagcctctacgtctttatcttgttcctcaagattcttagggcagtgcgtgtgggtcaggggtaggtgtgtctgggaattaagagtatctagttgatttagtagctatatttctcttctttagcctgtttattgggaaatgaaagacaatttaggctatttcattttcagtcagtgtctgttatgaattcattggaaatagcaatgtgaaaagaggaatgaatattgtagatttctttcattgtcatatttgtaaattactgggtgggatttataaacaaattattgactaattatgaacaaactgttgtttttttcttttcaatcaatatgaacaatcaagtgacctaacaaatttaattttaaaaatagatttgaaaggtatatagtagttaaaacaaggccccttgattcagattgcctgagttcatatctcaaataggctacttttttgtggtgtgcctttaggcaggatgcctcagtttcctcatatgtaaaaaagaaatgttaatagcagcttaccttgtggggttgttgtgagtgggtcaaatgacctactatgtgtaacgcactagagcagtgcttggctggagtaagctccatgtaaatgttagtccttgaatgaaagtagagctctggtagagatattccataaagacaaccttaaacatttttgaaccttttatgcctccaaaatatacacttccaaactcttctatcactgaccatattacttataccctaacaaggaagttattaagaatcataccagagtacaggaataaatcatgccagtcaggaaaaggggtacattggttattctatttataacattacttgagtatttataacaacaagtaaacaaaacgttttttagaaaaagaagagattactgtgttgtacaaatattactagatgggtaatttctctcctttttttccaatgtattccagaacccccatggatatcaaaattaaatgctcaaatcccttacataaaatggcatagtatctgtatactttaagcagattacttataatacctaatataatgtgaatgctatgtaaatagttgccatactgcatttttaaaattaatattattttttaatattttaacctttttttttttttttttttttttttttttttttttttttgagacggagtctcgctctgtcacccaggctggagtgcattggtgcaatctcagctcactgcaacctccacctcccaggttcaagcaattctacctgcctcagcccccaagtagctgggattgcaggcacaggccaccacacccacctaatttttgtgttcatagtagagacggggtttcgccgtcttggccaggctggtctcaaactcttgacctcaagtgatccgcccaccttggcctcccagagtgctgggattacaggcatgaaccaccgcgctcggccacatgtttttaacttttatttttccaatatttttgatctatgattggttgaatttgtggaagccaaacccacagacatggagagccagctgtgtattgttattgtcatgtcttttattctcccctgttcttttctgcctaaatgccttaggtacttctttacagagttagatagcatttaccattgataccacccagagtggtgtggtttgcttctcctgaccctttcatgagcaaagctggtttcaggggaaactcagggatctgaactgttagtaacactgattagaaatgcagcagttttattcaggccttggttttattgaccatttttggttggctcttatctctgtgactgatcatgtatgcgtatttcaaatggataaataaactaaaaagtgtttaatactccaaaatgattagaagtgtattgttaaataccaaaaagaaaataattctggggtgtttcagcatgttattctgttaacatagttcacgttgagtgtttgtattcatttgttgtttgtttgtttgtaagtaacaggttttgactaaaattccacggactgtggaacagcacacactggggtctatcggagggtggaaagtgggtggagggagtgggtcaggaaaaataactaatgtatactaggcttaatacctgggtgataagatagtctttacaacaaacccccatgacacaagtttacctatataacaaacctgccattgtacacctgaacttaagtaaaaaaaaaaaaaattaagtcatgtagatgcgtactttgaggtacaaccacgtgaatgattgtgccaaattattatgacagaaaagtctattgttgatttagaaaaagaattaacactgggcatcatttgaataatgggctttataaagaactgcacatattggttactggtagtaaaattcacagaatgttagatataaaaagtcctaaagggtacaaggaaaacttggtttgtcctaggtcaactagtaagattaatctacaacccaggcttctgactctatttcaacattcttctcataatgtcattgaggttacacttaataaacaacgttaaacactctctcttttaaaaaaaattgttggctatacatgttggctcacgcctgtaatcccagcactttgggaggctgaggcaggtggatcaccagagttcaggagttcgagaccagcctggccaacatggtgaaaccccgtctctactaaaactacaaaaattagctgggcatggttgcaagtgcctataatcccagctacttgggatactgaggcaggagaatcgctggaacccgggaggcagaggttgcagtgagctgaaatcgcacattgccctccagcctgggcgacaagagcaaaacttcatcccctcccccccaaaaaattgttaactactacaagcataaatatgaatatctacttacctgcatttctgaagctagaccataagtattaacagtgcttatatctacagtccctggcagatagtcggtgtaagaaatatagattaattgaatgaatcatatgatcatggttaaggttcttcttttgtgcgttttagcatttttaaatttttacattgatcatgtattgcttttgaaattttaaaaaacctggcaaaatgtaattacgatagaaactgacatcaaaaagctttgtagctgaaatagtgtaattttacactgagtttgaaacttctgatatcaggaactttgatgagcctaatacaggtgctatacgggatgaagtgaatatgcttagaatttttgatgaaaacaaatctgactactcaggtttctctatgagaagggtaggcagtttgatttgtaattatgggaagctgaatgtgaggcttggatgaggctttgtcagtatcagaccagctccttcctattgggggctgaattcccttgggctctccatcagagagaccaacaggaagcaatcatgtagttcttccaacacactcagaagtcagtaggtccactccacaaataaattgtaattggccatatagtaaaatatttggtagtgttattcttgtccttttccatatgtacaagagagaaaaataaaacaacttcacatcctcctaagcaagtgatcgagtttagatatttgtcccctccaaatctcatgttgaaatgcgacctcctcatgttggaggtggggcctcactggaggtgattgggtcataggttccctcccagtggtaatgagtgagttcttactctgttagttcatgcaagaattgatggtttaaaagagtctggtgattctctcccctctctcctgcctgtgctctcaccatgtgacatgtctattcctccttcaccttccagcatgattgcaagcttcctgagttcctgaccagaagcagatgctggcaccacactttgtgtatagcctttagaaccatgagccaaatcaaccacttttctttatgaattattcagtcccaggtattcctttatagcaacacaaaacaggcaaataccggagcaacagatcagaataaataacgctgagaggacctgacctgatttgctataggtattgttctagggtagcccctggtatccattgaagactctgaccgtgagctctgcctgcattaatataactggaccaaaggaaacagaactttagttttatgaatgggtgtctctccaaacaatttttcctggctgagctttgttcattaacatttttcaatttctaaagaacaaataatctccatttctctttttatgtccggcccactctcctgatagatataacctccctcctgtttagttccatgaattgtactccagctgcccaaacctgagaaaaggaattaatgactcattctctctgttgagtgagggcttattccagctggctcgcgctattctgtgtgtatggattctgtcagcagggttgaaataagatgttaactggcagttattcattaatttacagcaagaacaatgacttgactctatgtcaaccatttctgaaacattttgactaacatttttcctgttgcttagaactgaacttaaaagctgggacaggcatatggaaagaagcaaggatccccagttatgctgattggaactaggactaatggttttaacacagaatgtttatgcatgtagaatgaaatacacacacacacacacacacacacacacacacatacacgcacatacaaggggtcatactttatgtttgcattttcctctaaaagtatccctaagagtatttgtggttagtactacatttttttcatcatagtttgtttaaaagataaagcagatattataattattttctttacaggtgggaatgagttaaacaataattaactgaacaaaagcaatgtccaggtactgcaaaactttacataaattactcctattcattttcacagcaaccctctgaagtaaatggtattatcccaacttacagatgtggaaactaatactaattaacttacctagaatcgaggtggcagagccaagacacgaattcaagtttctcttcctcaaatttaacattctttcttgtacaaatgtaaatgttctttaaaaatgaatacataatggcaggattcatatcaattttctgccagaattaccatgtttacctgaagtaaaatatgctcataaacaaagcagaaagtgcagctggtgcttacatctaggatgattaactggcatgtacagaatttttttttccttcaattgcaaagtgaatgcagtaaaattacagggcaatgggtttcttcccacacaagacaaggtgatctgaatgatatagaagagaaatgccacatgtggaaataatatatcaaggatttattatgtgtctgtggtcattcttaaggtcatttttgatgtctacacatttcagcatttgagaagttgtatattacatgcatacaaacccatattcaaatatacaattggctaaacaagtatttgttttaataaagtagtagtaataaaatatttatagcaaaggggacaagactcaggactgagaggaaaaactcaattaaaaaaaagacaacaatacttaaatctcttgatgcatctacttagcaatgtctacaatagcttttttaacactatcagaatatagagcataaattataatgtttatcctgcttttaaaggaaaatttttctcttatgcaatcatggtgggagaaaagaattcttaacgtgattatttgtctcatattttattttaggattctgttagtgtttttaggattctatcaatgcaaggtgtaagaacatgtcctggcagttgaaggaaaggctaaggaaaaagatgaaagagaagtgtcgcatcccttaccctccttttaaagaaatgctgaagttgctgagcagaaggtgccacagtcatgtcccttaatttatccctcaaccttttccagaagtaaagtgactacacctaagctcagacagtgacagtcgtgggagaaaagctttatagaaacagtgataggaataaaagtgtgtgcactgggatagatgtattttttaattacagaagtaactactaatctatataagagaggctccttccactctcagagcttccaacttaaccatctgtgaagagtaggtccttcaaaaccaactgtagcggcaaagttctgagatgatatttccagactcagcagataggaacaggcatgctaggtgagatatggcagggaatattagtcagggttctccagagggacagaaccaatttgtgtgtgtgcgtgtgtgtgtgtgtgtgtgtgtgtgtgtgtgtgtgtgtgtgtgtgacagagacagacagaaagagagtgctttagtttaaggaattggctcacaattatggagactggcaaatctaaaatcttcaggctgggttggcagtctagagactcaggaaaagctgatgttgcagtttaagttcataagatttctgttgtcagaattctctcttgtttggggagaggtcagtcttttgttctattcagatcttcaaccgattgaatcagccccactcaccttatggaggacaatttgcttgactcgaagttcattgatttaaatgtaaatcttgtctgaaaacaccctcctagaaatattcagaataacgtttgacaaaatatccagggaccagggaccatggcccagccaagttgacacactgaactgaccattacaagtctagttggcacccatatacatctccttaagccattcttaatctccaaatgtggtcacattctgaggaactggtggttagagcttcaacatatgcattttgaggagatacagtgtagtccacatcatggaggtagccctagaatttttttgtttccattcctattggcagagacaattgaggaaaagggaaagttccctttcatttattttactctcctgcacatctaatctttaaggagagaatagaatgagagttggggcacaaaacaaggattgaagggcagctgacttgagtccacgtagccccagaacaaagcaaaggaacattagattagtggggtagtagagattaaagaagtaaacagaattgaaactggcagaagatagggtcattgtagagtggaaaaacatatctgaaacatggttgttaagtcataagctaatatttggaaagacagactccacttacttttttccaatagatatatatttactaaaatcttgggaaagctaagcttatgatcaggtgtaaccaggccatatcccttgggtcccaaagtcaataagcagggagagcttggtgtttaagtccttaggaatgggtcatgccactcagaaaagagaagagatgtttcgatctgtggattgttatcatctgcaacccaggaggctctttgattcttcatatcacgttatttttacctgaggattgtagataccctacagtcttaaagcctctggccaatctgccttggaaccacaggatacattaggcaaggtctggggctggctttgacaaaggacacagtattgctggcagaagaaatcactcttaaagggaatatagatgctactgtgagagactgatcaactaattaagatcttgttgaagattctcaaattgagtttgagcttgttgacaaaaaccaggcttaggcagagggatgatgatcctgagagcatcctatctccatcaataggagtatgttttcaacctagtggtttttttttttaatttttattttaggttccagggtacatatgcagatttgttatataggtaaactaatgtcataggggtttgtaatacaggttacttcatcacccagggattaagcctgttacccaataggtattttttctgatcctctccctcctcctaccctccaccctccaccctcaagtaggccccagtgtctctttttcacctctatgtgtccatgagttttcatcctttagctcccgcttattagtgagaacatgtagtatttggttttctgttcatgtgtcagtttgctaaggatgttggcctccattcttgccatgaaaaacaacaggaaaataaagcactacccttgagcatgcctctagaacttgaggttcaagaacaacagaagagtggcagaaaactatatcttaaatatattctttatcttttgtcagtcctcaatctggcaagaacattgctgctacctgacctcatagacatgcatttgaactcctacttttagtatctgctctaagatctgatttaagaacagatagtagaatagaataagcttggttctctaggtatcaattttcccaaatttcacagtagttctatgtacagtcacattgtatattataaaatatatgtttaactgtcacatgcaagtatatttcagtttttaaaagctcaaggtgcatgctgatagtcactataaataaataaatacatatgtcaacatctccctatccccaattcctccctcatcaaaaactaaataaagggcaaatgaataaataaataaaaatgtttaaactgctgaccttcctgtcaacaaaggtgatgtgagttacaagaatctgttttctagctggagatgtgggcgcagtcatgagtatgcctccaccattaacagcactaaacccaacgtactcacaaacaacagctgcatgaaaaggccaagcttagtatcatgtgtaatttatgagagcttgttaaaacacatacatgcacacaaagttgaatgaataataccaggtgatggttaggaaacagaaaattcctgaagcatctcttctttttaatgaagtatcaaaaatactgttttattaaaatcgggagaaaaaaggctttaggccaagtgtgttgggttggccttgcaactctacttcggttacaaatttaaaggccaaagagttagagattgtgtatatgggtatgtgtgttgcaggttggggtgtgggacatatcaatacaataggtaaaatgaatggtggattgtgtctgggataatgtggcatattttatctcaaatcccaaccttatctcccaataggagatttggatcatgagcaagatttggcttaggctagttttcaattcccaggattccagctccttcatagcaccacccttatgcttactaatcccttcatctttaagacacctggataatgagctatctgcatggttggaaatagtctgggtttgttctaaattttacattagataacaggtcagcaacaaaataatgggagggggaaattagaaaacattaagtcttatttcatgtcatgtgatacagtatatatgtatttttttaataaaagaaagtgacatatattgtagttcaattggatatttacatttcatgtagaccataatggtagcggtaattatagaaatcttagcaactttcaaaggaaatttttcccagcaagatgactgacaaaatttttgaaagtaatagagagaaactgaggcataaaatttacctgaaagcagtcctgtttaaattggacaaaataattaccttttcttacatccctcttttagagttttcctaatatcatttaatacatagatagtactagaaagaaaaagacattttaaattaagaccaatgtgaagcattatacccatttagtatcattttgcccattacccttatagaaactaaaaatagaatgagtgctcagagtttgtactgtaactgcctgccacttacatgggataactatttttagttccatcgtccttattaaaggctttcattatgagttcatttatggaaatgttatctcacagagttttttttggagacttttctgagatctcaaaatgaggtctcagaaacatgattagaacatagtcatttagtttcccagcaaatgctgatcctttccaggaaagttctataaataaggaaccaaagctggttgtcagtaatttgaagtagctgggttggaccgtgaatattaatatgtaaattatagcttgtgccatctatacacaaccaggattgtatgcatatcttcccatggtttattttaagtctgaatttgcatacaaacactggtctaattgagtttttaaaaaaaattcttaagagatgccatgtgttacttaaagatgttttgttttgaaactttgtgataggtaagatccactaatgtttgtaaaatttaccatttgtaggaaatattctattctcagtaattcctggtgaaagtggtaggtgggttagagatcataaaatccagtcttcacgggaccaagctggaacatggctgggtagctggtggggtagtgacagccctgcttcaaggagagatcagaaatgagggatgagactgagtgcaaagtcaaggtcaacacaggctaatcttggcttttggctacttttctgtaaagagtaatgtttctctatttgaaggagtgattttaattcagaagtatattggaaaagtgaaagaattcctagagaaaagttaatcccagacaagatagtgaatgacatatagtttattatccagtgacctttagcacaacaactacacatatgcgcaagcgtaactgctgggctgctctggagttcgccagaaaccccttgcccttagtttgaaggagggaaagaaatatctgtaattattgctctatatcctttgcttttgacataattgattctctggcatttaaaatttatatccactcgcccataggattcttttaactctttcattgtttatttccttgtataagaacaggtctgctagtcagagagaatgttgagtatctttcataatccttgtctttatgggaccaaacatttctgccttgtgctagaaagatttttcagcccagccccaggcaaccaccattcattctactctctgcttctatgagtttgactattttagttacctcacaaatgcttttgctgcatttgttttgtattttaattacaccgtttgatggcaatgctagaaatttaggagctacagctcctctctaacatgaatgctatcttgtcaatgccttcagaagaataaagatcataattctttcttttacattgtgatttctataagaatagtttcctatcttcctggatctagatggaagatattaactttcagactaactgttcactggacaatttttctttcattattcctaaggtctttattgtacatatgatggtgtctccaatagttaaatatgcctctaactacaacatataatttaaactcatacctcacctgggattatattgatgatttttggttcaactatttctcaaatttgagatgctattcagaatttaagtgaggtctaataccataggcagggattagaagtccaggccagaagtctgaagtcatcagcttgggttctgttgatgtgaagtgaattggatcacacagagatagacatggccacagtcaggtgtgatacttgatgtgcctatgctttgcctcttagccagttcttagtcattccatgcaccgtgctccttagtagaagagagaacccttcaggtagacttctgtgaaatcctcacaaggcacagaaatttaatggcatttctgagagtcacaagggttctgtgaagtagaaattatgctctcattacattagcttaatgctgagtatattgggactcttgtaaatggacattttgttcatggatattttgttttagcaatttaaagaatgttaactagcttaatattttagagtgaacattttaaagtgataaagaaaaataagaaactttcttatctcaattaaaaatatatatgtatttttggtccacacaaatcacatcacccaaataattcagagcactttgctagaaaaggcaagacaaggtgtttctgagagtgtctccgcatttagatagactatttagttccatacttagagatcatccactagggtttctttgagcttggtgaagaatattcagcaacttgcctaagctctgggaatgtgagcatcagttatgaatataggtcatctcagtttgtgcacagcacactttctgtcagtccaatataaacttgtatgagtagatctgtttattgtgataactacaacttatattaacttgttgacatgctttttctaacttattttcttgggtctgcatttttcaaagatcaaaatttctgcatcttcagcacaagtagattgaagaacacataatacggatagtgattaggaacattcaggcatggggaacgggtgacatattgtttactgtgtttaaaagatgtgttataaatttcacttagtcaaactaacttgatgaaatcaagatagcctatgaggaagaataagctctgcaacttacatttttatatgggaagaaataatgagtcagtcttcttgaagttttttacattattatagtaagaacatttaagatgagatatacccttttaacactttacattttaagtgttcaatatagcattgttaactctagataggacgtttcatagaagatcttagcatctgacgtaactgaaactacatgcatcgaatagcatctccccatttctcccacttcccagccccaggcaaccaccattcattttactctctgcttctgtgagtttgactattttacatacctcattgataatggtttggatgtttgtcctctccaaatcgcatgtagaaacatgattcccattgttggagatggggtctaatgggaggagattggatcgtgggggcagatccctcatgaatggcttagtaccatctgcttggtgataagtaagtttttgctctgagttcatgtgagatctggttgtttaaaagtgtgtagcacctccccaaccgatctcttccccttttgccttccaccatgattatgagcttcctgaggccctcactagaaatagatgctggagccgtggtggtacagcatgcaggactgtgaatcaattaaacctcttttatttcttaaattacccagcctcaggtatttcttttctttctttttttttttttttttgagatggactgtcactctgtcactcaggctggagtggagtggctcactgcaaccttcgcctcccgggttcaagcaattcttctgcctctgcctcctgagtagctgggactacaggtgcgtgtgcccacgcccagctaatttttgtatttttggtagagacagggtttcaccatattagccaggctgctcttgaacttctgaccttgtgatctgcccgcctcaggctcccaaagtgctgggattacaggcgtgaggcgctgcgcctaaccatatttctttatagtaatgcaaatggcctaacacacttatgtaagtgaaatcatgcagcatttgtcgttcttgactgggttatttcctttagtgtgatgtcttccaggcacatccacattgtcgcatataatgaagttttaataactgttctaagacttagctgaagtcaaatggaatgcttctggtacttccctcatagcttatctcctggccttgactatggccatttcctattcccaccctgctctccaaggtggtattctagccatccttcaaggtcctgtgcgaataccatctcctctaggaaggcttcctttggtttcaaggcagagttcaatcgtaccccatctgaaaaccaatgacactttggagtacctcatgatagcccttcacaaacccctttaatgtgactgtgtgtgtatcgtctctctacagtgagaataaaagctccaaagccaggaactatatcttcctcacttcctcattctccacgggaccttgcgtttaataatttaacgaaaattcaacaagtatctgttgatggataaataatcatggaaaataaattccagacgaggtcagataaagtggattatatgggtaaacattgtggaaagtaagcttttcgaaatattgtaactggtgaaaagttgtccatcatagttaatgggctacctgagcaaatacctttcctgagctttttcttgaattcatagaaacttgggtctgaaagaaaacttacaagtcatcactttttttttttttttgagacaaagtctcagtctgttgccaggctggagtgcagtggtgcgatctgggctcattgcaacctccgcctcctgggttcaagcgatttttctgcctcagccttctgagtacctgggactacaggtgcacgccaccatgcccagctaatttttttgtatttttagtagagatggggtttcaccacgttggccaggatggtctcaatctcttgacctcatgatcctcctgcctcggcgtccaaaagtgctgggattacaggcgtgagccactgcgcctggcccaggtcatcacgtttagcctctcagtcctctatgttagaaaacagtaatccaaaaaaaaatgatttctttaatgctagatagtggctgaagtaggactagaactcaagtattttaaagcctgcttcacatttcttgttactaagctgcactgcctcccacacatggcctattttggtctctaaactgtcatgaaaacagatgctaggtccctgtcaaaatgtttgtgtatttctgggtgtgaaaaggtatgtgtgtgtatgtgtgtgtttgtgtctgtgctcatgtgcatggatccctggtggaggggagagaaaggcaatttgtagctgcagacttctgtcattgcacgcagcgcactctgccatggtgagttcatactccacagcaacagaacagctgctgcaaagggttggtgtgctattttcatcttgggtgtgtgttttgcatcaggctcttggcaatggcaagagtaaacctctgtaaagaacaccttcttaaccttttactgttacccacacttagtcaacagaaacaatatgtttaacaggagtttttcctgctggacagttaaatatgcagttcttgcatatgaaacatgaatattttgttcccttctgtggaatagcaataataataacactactagtaataccagctaaaatattttaagtgcttatttcaaacggaaaattttttttttaaatgccagattttttctctctagggcaacagtcatcttgtataactttgaattcacactaaaatcctctgtagcaacataaagatagaaaaatcctcctttcagcaatatggcactgtgtgcaatgagcaaatgcaatgatatagaaggaagattgagtttaagagtatcagcagcaaagtgacagaaacgctcatacattaaaaactaaaaattagacttaattggttataggtgggaggagcctattacttttggtgaggacacatataggtgggaaaaagagaaagaaaaaaagaacatatctatgacaggaagcttcacagatttcattttcataatactttttgagactaaaggaaatagaacattttctgtcatatgtgttccaagtaatgtcattctgtttctcatttgtcttttgacctggctgtataatgtatgtggtgaaacagaactcctttattattaattttttagtggctacattagtaactcttttcctgacaattatgaggaagctcttgtatattgacaagagcataaatctatcaacagccaggttcatacatagagtccacctcttaaaggttataagatactgggcaagtcatttcatttctttaaacctgtttcctcatctgtgaaatgctgatagaatcataccttacatagatcagatgtaaataaaatagtcgtaagttagcgctcaggaaattacagtattctgtgcaaatcttattaactttgattttgtttcatatattgataaatttacatctagctgaaaatacattgaatcattgtcatggactaaattttaatatgtcttaggaaaagagtccgggttgaagtgcagtggtgcgacgttggccccctgcagcctccgcctcacaggttcaagtgattctcctgcctcagcctcccgagaagctgggattataggtgcatgccatcagacccagctaatttttgtatttttagtagagatggggttttatcatgttgaccaggttgttctcgaactcttgacctcaggtgttctgccggcctcagcctcccaaagtgctgagattacaggcgtgagccactgcaccggtccaggacaagaatatttttgaaactatgagctttatcatcagagacattaaaacttcagaaggaaagagacctttgagttcttctgagccaactccttccttttatcactaccaacaacatgaagtcagagggaaatgacttgcctacagtaagatgagcaggaagaagtgaaagcagattaggggctgaggtcttcttagtttatgtccagagatctttccacttcacccaccatactctacattagtcactaccacgaccatcatcatcattatgaccaaaattaaatctaaacaacttttcaccaagtaattccattttcatgctaaagatcaggcagttcacttccatttcctcttttgtcagatgaaggaattgggccgggcgcggtggctcacacctgtaatcccagaactctgggaggccgaggtgggcggatcacgaggtcaggagatcgagaccatcctggctaacacggtgaaacctgtctctactaaaaatacaaaaaattagccaggcatagtggcgggtgcctgtagtcccagctactcaggtggctgaggcaggagaatggcgtgaacccgggaggcagagcttgcagtgagctgagatcacgccactgcactccagcctaggcgacagagcgagacttggtctcaaaaaaaaaaaaaaagaagtaattggatgaggtgatttatgtaattcctacaacctctcagtgctaacaaagcaacattcaatgacatttacaatgatcatggtggcaagttgggagagagaaagggcatttctgaagtaataataaaatgagtaaaataagatggtagtgccgtgtgttgatattgtgaactttacatttttactttctctcatccaaatcacagtaaaggagctgaaataagattttagttaattggtagccacacatgcccacaggctggtatgccaggctttgtttttctcacactgctgtaccatatccaaggccagagtgaatttcaggtgtcatgggctctacaagggcaagactggagtaggagctaaagtcaagttcccattggagaggattgaccaactgatagaggatggaaacgaagagccaaaggggagaagggacaggaagtactgagatctgaaagcaaattgcctaacatttagaggtgagaatgtgaaatgaggccaaccagggctggtgcagagccagaacaagggaggtcagaaagctaaggtgaaattctggaaataaatatgatgagagcttattgtaggggagacttttgggggactatggcctcgatctgatgtgtctgcttgtccccagtgctccttcaaacatgctccttgaagcttcatgcctgccttagacagccagagattgaaaatgaacatatattttgaaaacaaagacactaagaccattcacaaaaattcaagaagtaattttttaaaaaaaatacagtaacatttaaaaaatatatgttatttcacaacatatgtaaaaccattaaaatacattgacatcccaacacatattttggggtgtcaaaaaagaaatatggcagggtgcagtggctcgtggctgtaatcccagcactctgggaagctgaagcaagaggatcgcttgagcccagttctagactaacctgggcaacatggcaaaaccttgtctctacaaaaaatagaaaaacttagctgggcctggtggtgtgtgcttgtagtaacagctgctcaagaggctgaggcaagaggattgcttgagcccaagagtttaaggctgcagtaaactaagctatgatcatgacactgcattccagcctgggtgacagagcaagaccctgtctcaaaaaaaaaaaaaaaaaagaaaaagaaaaaaaatagaaatagtatatgttgataggaagcttagtgaagaacattaaaaagatttgcttgagctcttggttgccatggcagagctgcgggagctccgggctcagaagatggtggactctataaagaagcctcttgagggagttacatctgggagttgtaatttttcatgttcagcaccagatgttttgaggacaggcaggtgtttatgcagcaggtgtggcagtgcacagaggactgccacatgcctctggctcaagaccaagccttgaggaccacggagataaagaagttccaatgccacctgtcccagtgcaccatgcattgcaacgacaaagccagagattcactagatgcagggagtgaggatctttaggcgaagtgacagctggacagttgtgtgaccaagtgttgatcacatgcatgtcaccctgacaatgaccaaggagatgaaggagatgttctcatccactgggatacgtatcttggccagtaaccatcagggctgaggacaggaatctgtttaacaaaaggaaggagaattttagtctttaaggatgtggggaaaagaaagagagatcagactgttattgtgtctatgtagaaagaagtagacgtgagagactccattttgttttgtactaagaaaaattcttctgccttgagatgctgttaatctgtaaccctagccccaaccgtgtgctcgcagagacatgtgctgtgttgactcaaagtttaatggatttagggctatgcaggatgtgcatagcccgagaaacacccacaggtgtggaggggcaggccaccccttcaaaggcaagtgtcatgaatgaagaaattaaggatagcaacaagtataaggcctatgtcacttgcctttggacaaaggtccctttatatttcaatcctggaaagtgaaatgaaaaaactagtgctaaaattaggatcaaagatagtacaggaaagtgtatttaagtcaaaatttcatgtggcaagtgcttctcctggcagcaggaatatccttgtaccaagccagagccttccaaggtacaagttctttttcactatataggaaccgacagactggcagggtcctctaatctggctgtgatctggtggagtttgaggagaggtgtttctgtttggtgtgaggctcctgtttaccagaagtgttgctgcaccattttccataaacaataaaacaaaatccatgagataattcatttagtggggcaaaaaacgtttgttggtctttgttttgcttggttttgttttatatgtacaagggcataaagttgacttaggatgtggagttgggaaggagagtagtttggataagatctttgaaaggttgcttatgggtatcctttcctggtcatcaagatgtggatgtacctctcttgaaattcttactcactgcatctttcagcctggatatgatgcaaaaacatgagcggtgacttcacatttaggtttgaaagcagagcttccctcttattggctgatggttcctgaggatgtctgcagcagagtggcaggacaatctagcagaaatattttccacttaaagagatagggggtttgtgtttggatttggttctgatatatacctgtatccaggaataaacagtgaaagaggaaccgttggctacataattatgagagttgtgaagtgctgaatttggaaaaacccggctttcatagaacagaatggaatgaaagcccaaacccagcattgcttacgtagcccctgaattaacagaaccctattgagataataccctgccaacagcaaggtcaaagaagaagaagtaagcgacttggctaggatgagctgtgacttccttagagcaaaggaggggcagccccattaccaaataccacttttgcccaggcttttgtgacatgcagtgctcctgcccagcatggcaccttattttgacaaggaccttgttatctttccaccaagttatcacttgaaatgataatatagcttgtatgttgttcccaagctgtcgtatattttcctggttgtttgaatttaacaatgagaataataaggtttaatactcctccctaagaaaagatttgcttatttcccaatttgaaattactttgctaagagggatataatgagttctatagtgaaacaagtatgtgttttatcctaatttctgaaattattcctgaaaattcaagtccattgtttgtctcccaccctatcctttggttctgtcacctcagaactaacaccttgacaaagtgtttcttttttgtccttctaccctccccgcaaaagtttattttttaataaatcgtttctggcaccaacccaaaccacaattacttaaaaagaaaaaaaaaatagcccaggattccatttacttataaacttgctttctgaactttatttttaatttcagcatttttttttttttttttgagatggggtctcgctctgtcgccaggctggagtgcactggcgtgatctcggctcactgcaacctctgtctccctggttcaagcgattctcctgccttagcctcccaagtagctgggattacaggcacacgccatcatgcccagctaatttttgtatttttagtagagacagggtttcaccatgttggccaggatggtcttaatctcctgacctcgtgatccacctgcctccgcctcccaaagtgctgggattacaggcgtgagcctctgcgccgtgccattttcagcattttttgatgtcagttatgggttcattgttttcaatataagataacatgagcagagactgtgtaggtgggattgagagtgaagactgggctcattgacaacctctcatcatctcgtcaagcagagtttcccatatcctctgaatctatgcctgtgtaactccaaatattagcataaatataaaaaattcatccatttggatattttatctacatgatattaattattgaaatgaatctaaattcttttcacaatgattttggcaagaagcactggcttggagtaaagtcagaaaacatgacacatagcaaacatttatagaccatctttttaattgtccatatgaaaagaataacatctagctgattagatgtattttaggggaatttgggaaagaataaataactctatgccttatgactgtcctgatatctgctatttatatctctgttctgggcaaagaacaccaaaaccgaatgaattaattgttgtgcatgctattatgtcttggatatagtaatatcaacatttatacaaatatcgactcagtacagataaaaaatagaaagtaattttcatcttttgtttttaaagaaggaaaaatattattatagaccctgaaccttcttcttcactgaatgggaggaaataaaagatatagaagcctgaggaatataaaataataagaaggtaatgtgatagaaagtggctgaggctatgtagtttgaatctccagaaaaggcctctctgagaaggagactttgagcttggagatctgagtaacaagaagaagccaaccatgcagggaacagtatttcaggcagagggaatagcaagcacaaatgctcaggtgtgaatgattccagctgtggtagccagagtctatgatgcaagggctaggaggggtggtagtgaaaggagtttgcattgtatttgaacaccaggaggaaaccaacacgtagcattaagcaaaaagtggtatgatatgatttatagtttcaaaagattacaatggttgttctgtaagaagataccagaagaagcaaggagaccagatgtggctattttaaaaatttttcgttgatacataataactatacatatttatgggatacatgtgatattttgatatacacatacaatgtgtaatgatcaaatcacacacttaacatatctgtcacctcaaacattatcatttctttgtgttgggaacatttcagatctgttcttctagctatctggaaatataaaatatattattgttaattatatgtcttaggctgtttgtgttgttataaaattaatttataaagaaaaatatttatttggttcacgtttgtgatgtctggaaaaattcaaaattgggcatctgtatttggtgaaggccacaggccacttcccctcatggaggaaggtatagagagcccgtatgtgcagagattacatggtgagagaggaaacaagaagggaacaggaggaaactagcagaggaagaactcactcttagtttctgcaagaggaattaactcactcccgatctccccactccctgggtaaggcattaatctatttatgaaggtttcacatctatgacccaaacaccttccattaagccccaccttcaacactgggaatcaaatttcaacatgaggtgtatagaggcaaacatccaaactgtagcactatagtcactcgaatgtgctgttgcacactaggacttatttattccttctatctaactgtatgtttttgcacattaaccaaactgtcttcattcctcactccctcatccttccctgccttcagtactatatttctactctttatcttcataagattcacttttcagcttccacatatgaatgagaacatgcaatatttgtgcttttgtgtcaggcttatttcatgtaacataatgacctccaattccatctatgttgctgcaaatgacaggatttcattctttcttgtggctaaataatattctgttgtacacatttaccacattttctttatccatttactcattgatggatatttaggttactttcatatactgttattgtgattagtgcaacaataaacataggtgtgaagttatccctttgatgtgcttttttccttttctttggatcagtccccaaattgagattgctggatcatatggtagttctatttttagttctttgaggagtctccagactgttttccttaatggctatgcaaatttccattcaacagcgtataaaagttccattttctcggcatctttgtcagcatttgtaaaattttttttgtctttttgataataaccatactaactagggtaagataatacctcattgtggttttgatttgcatttcccaaataattccaggaaagagatgacattgggttagattagaggggaaccaggggatgagtacaaaagatgaggagaagttagaatctattttagaaacagagtcaacagaactcaccaaatagatgcagttaaggaagcaaggaaagtaactaagggtaacacctgtttgtggcttaagtaactgaataaatgggggtaagacaatatgagacagcaaatatttggggaatattttatgtggtatttttggaaaaaggtgaaaatgttattaatttaaaatctattatgcttccaattgaagatgaaaagaattgcctagaaaagtctggaactcaaggaagaggtcagggctggagatataaatttagaagacattggaatataggtttaattaaagccagttggccagatgagatcctccatgtaaagattatagatagagaagataagagggatcaaaaccaagccttggggaattccagtattaagagttgccagagaaagaaaccaacaaagacagaaaaagcaatcagtacggtgggaagaaaccaagagggcctgatgtcataaaggcatttcaggctagagaaagtgtttaattaaagagaagaaagaagaacttccattgcatttggcaatggaggtcacatttgtgatctggacaggatagttgcagagagtaatgagtttaagttgtacatcaaagtaaaagacacacactctggccaaaggaacagccacagaaggctggcatatgatgtgcctggcacgcaagttttggttttgtcctttggattctcctgttagatatatgtggctgttaaacaaggtctcagaaataacggcttggtaatggatgattctgacaggatacaagaaatcccagagtgttaagctcatcaggtttattgttagttcttgtttcctggaagtgtttgaagccttgactctattaggtgaaatatgactccattaaattgtctgacattttaatactttaatttagtgccagggaccacttttagtgtaaaatgtttcacagagggttctattttaaactgcctggcttttgtaactctcagttttttcttccaagcctttcaccagtgtaaccatcccaaatttgcatcttgtctgatgctaactgaggaagaagggcacctggagtttgaccagcaggaacaaaacatgttaaaattgttgcagaagatgatgaggtaaaaacacatagcactggggcacaaaaccctggagcctggagcctgttgcaggtgtttagcactgaccttccacataaccatgggtagccataggacctctttaaccctcagttttcacatttgtaaaggcagtgagcaggaattgcattttaaatatacaattgttgtcactggtagcatctatctggggccagtggcacaggagtaaagagaatttacccagacagttgtgaggaaagaaagccatattgattagagaaagcatgaaaatacgttgcaagggtgcaatgggcaaatcagcaagataggagctgactgcaaggagacaaaggcttgctggggattttatgggatggcgcttgtgctggggagggctatgtgctttactgataatgccaaagttgtagtaagctaacttgcagttttctattgtctgagggtctgatagtaagttgggcatgagaagattgttagtaatttgcacagaagggctatgtgtcctggaccatgaagaaaggcagacttgtagcttatctgctttttctttttggtttctcctgctcccaacaacctgactccttttctctaattaggacttcacaagtgtggcatctcatgtattctaaagtatatggtgaccatctaaggaagttggtttgaatgtgcaggtctagcaaagaacatgccctggatataaaacctaggaatcaccatctgatcgaagatggagatgaatgacttcaccctagggcaagaaggacttaagaagaataggaaggatggcaggaatggaggaaaacattttggatggaaagatgagacactgaaacaatttgaagattggaaggtgagagtctgaggtccaaagctttacaccagttgttgaagaaccttgatcacaggccagccaggacctcaaaggctcaagagaaatgatgacaaggtttgcttggcttatttagagctgggctatagagcgggaagattgtggttaaatcttagcagaactgataaaaagcatgaagttgtactgagagatttttcaactgtacatagttgcagaaagaaacaacctgctaccatagtaaatatttgtgttagaactcagtggatgaaggtggaggggggaacatggactggaggggctaacagagtatatgtagtaggcaagtgggattggagtacaagggaaggatagctgggggtgacgaggttgagtctgtgaatgagaagggcttaggtcaatttctctttctacccttcttccagctcttctcctccctctttattcctcccctcttccccttccccctcttttcctccttccctctgcctcctctcttcttcctcctttctgcctttactttatcctttaaagtcttaaaaaacaaaacaaaacaaaacaaaacaaaaactgtgatgatagaacccaaagtgtactgagagatttcttaactgtgggcaggattgttaagtggtagtaaactcaagacaacatttatattgcactttacaatacataaagcactttcacgtaattaactcctttgatttgatcatcacaacaatgcctgaggctaatagttataaaccttgttactgatgaagaagctgaaattcttatcagttaaatgtgttgctttgggcttagtaattggcagagcaagccaagtctgtctccagaccccgtggtcttctggttccaaattccatgctcttctcattatacagcacaatactttttttttttataaaatgggaaagtctttttttttaatgtatttacagacagttcatggctttagacacacacacaataaagccatttttattaaatataagaaagtggagcaaatttgcgtccttttttattttctaatgacaatgctaaaagctaaaaggcaattggccattgacgggagaacaaaggaacctgaataattgataaaatgtattctaaatccagaaactgtcaaagtaggcgatgtcagagatgctgcagttgcttggttgttcgtgatatctgatgacgctgcatctcagtcataaaaacttcagggaatctgaaagaaataataatgcgccatggtattttgagcttatcaccacaagaaatactctgtaattgcatcaaatgattataaatggcatattttagggacataataagcaatgcaaaggacaggtctgcttattagtgccaaaatttgtatttattcccatattgctttttttttcctaggcattttccggcatctcatttctgactattaaattataccccaaatagaatatgtaactacatgtaaccaacctattttggtctacattaagtgcagcagcataaatagaaactgaaaataatcagaagcatttagaatttcgtttttattcatctgatttacttggccttttgtctgggatgtaagtgattctgagcccctctccagactcacactttccccaggtttcagtacctggggctcacaatctcagtggaagagtttcaaggcaatcttccactcaggactccttatgccttgcatgcacacaaagcagcgttgctcaaaacataggaaacaactatgaggaataaaaaggaaaagcttgttccttaaagaacgagaaggaggccagcagtctttttcataccttcttgtttatagaaagcagatttttttttttttttttttttagtaaaagcatatttggagcaggaaagaaatatgacctagactgtgttgttttcttttattgtatctacaaatagtttagctgaagtgagcttttcagttattgattttaaatcataagtttaattcgtcatcaaggcaacaacaaatgtgatgtttggggcagatgcaaagttgaagtatgtctaaagaaatagcacgctagttgcgtttaatgtggaaggtaaattataacaaaacaaactaaaaccccacaaactctaaagattttcccttatagttatagaaattaggaaatgccctattgtgcatctttccttcccaactgtaccgagattttgaattttttataatttgtactaatatgtaactagaccagatataatctgttgaggctttcttgtgatggaaagcaggtgaaatcaattttcagttgaaatatgcttttcagttcactatatgatgtttgtagggcttttttagagaagggctttgcatttagacttgagcagtttagcaggcttcgtcggagggtaaatctggctgctggatctagttggaatgttttcctttcataagaagagttggagataaagtgattcttgctttcaaatacacttttaacaatacaaaagaataattgaagactttttcttttgagacagagtctcactctgttgcccaggatggaatgcagcggaacaatttcgactcattgtagcctcgacctctcaggctcaggtgatcctcctacctcagcctcccaagtagctgggactacaggcgtgtgccaccacatctggctaatttttgtatgttttgtagagttggggttttgctatgttgcccaggctggtcttgaactcctgggctcaagctttcctccctccttggcatcccagagtgctgggattacaggtgtaagccactgatcccagcctaattgaagacttttgtatgttaggtgctaagtaatacaaaagtaaaagtgccactgtttctgtcctcaaggaatttacagtctggagaaggagacaaaatataaacaaacacactgataagtaaatgattacaaattgtgccaagtgccatgatagaaaagaattgatgtgcattatctctgtgctccctgttaggggcacctgacccatcaggaaggccattgatcatacccatcagtcttccaggtataccaaggacattggattgaatgtcacaggacctggattcaagccctgccatcgaatccagctgggtgtttctgggcttcagtttctgtatattcagtaatagtatcgaatattagtgggagtaatagcattgaatgccctccatgctcactggaacttcatccacaattacaatgtcttggtggctttctaagtttttttttaatttttaatttctaatttttgtaggtacacagtaggtgtctatatttatggggtatgtgagatattttgataaaggcatgcaatgcataataatcacatcatggaaaatggggtatccatctcctcaagcatttatcctttgtgttacaaacaattcaattatgttttttaagttattttaaaatgtacaaatacattattttggctatagtcacactgtcatgctattaaatgctaggtcttctaattattttttgtaccctttaaccatctctacctctccctgatcccccagtacccttcctatcctctggtaaccatccttccattctctatctccatgggttcagttgttttgatttttacattcagtaaatgagtaagaatacacaatgtttgtctttctgttcctggcttatttcacttaacatgatgaccacagttccatccatattgttgcaaataacaggatctcattgttttcatgaataaatagtactccattgtttatatgtaccacaatttctttgtccattcatgtgttgatggatacttaggttgcttccaaatattggctattgtgaacagtgctgcaacaaacatggatgtgcaggtatctctttgacatgctgatttcctttcttttgggaatatacccagcagtgggattgctggatcatatggtagctctgtatttagttttttggggaaatcccaaactgctcttcattgtggttgtactcatttacattcctagtggctttctagaacctcctcttggggagccatatggaaattttgctgaaggtgagaatatggcagcttgatgcaatgcagtgttttttcaagcttcttaatttgttgttgttttgagacctaagtctcaggagagatgcaccgaggctgctgcagagctgtagagaggagatgaggagcgagcaaaggaggtagggttggaggcgcagggcatctcccaccctgacttgtctcagacatgcccctcctttatctgttgattataccaggcttacagggaggattttatccaaagaattcacctgctaaaagaggaaaacattttaaaattactgttgtagtccaaatagtctctggaactagacgattctggattccaaatatagacatgtggtgcttaacgacagggatactttgataaatgcattattagactattttgtacttgtgtgaacatcacagagtgcacttacatgaaccctgatggcaaaacatactacagacatactacatactaggcttatgtggtctagcctcttactcctaggctacaaatctgtacggcatgttactgtacttaatactgtaggcaattgttaatacagtggtatttgtttatctaaactatcaaaacctagaaaaggcacagtaaaatatggtataaaagattttatttaaagtacacctatataaggcacttcccatgaatggagcttgcaggactgcgtgttgctctgggtgggtcagtgagtgagtggtgagagagtgtgaaggcctaagacattactgtacactactgtagactttataaacactatatttaggctacctatatttatagaaaaatcttctttcttcaataataaattaatgttagcttactgtaactttctgacttaataaatgttttaatttttcaaaactttttgactctttttcaataatagcttgaaatacaaacacattgtacagctgtataaaaataatttctttttatcctcattctacaaacttttttgaatttttaaattttttaatataatttttaaaattttgttaaaaacaaagacacaaacacacacattagcctaggcccacacagggtcaggattgtcagtatcactgtcttccacctccacatcttgtcctactggaaggtcttcagggtaaataacaagcacgaagctgtcatctcctataacaatgccttcttctggaattcctcctgaaggacctgcctgaggctgtttcacagttaactttttttttttttaataaaaaatacatgtagaagcagtacactctaaaataacaataaaagtgcagtatagtaaatacataagcgaataacagtttttctaatcattatcaggtaatatgtactccatataattgcatgtgctagactcatacaagtggtagtgcagtaggtatgtttacgctagcatcaccgcagacacatgagtaatactgtgacattatgagggctatgatgtcactaagtgatagaaattttttagctctgttataaccttataggtccacatcatataggcaatccatcagtgaccaaaatgtcattatgtagagcatgactgtattagttcgttttcacgctgctgataaagatatacctgacactgggcaatttacaaaagaaagaggcttaatggactcacagttccgcatggctagagaggcctcacaatcatggcagaaggtggaaggcacctctcacatggcagcagacaagagaagagaacttgtgcagggaaactcccctttatgaaaccatcagatctcgtgagacttactcactatcacaagaatagcatggcaaagacccgccaccatgattcaattacctcccaccaggtgtctcccacaacacatgggaattgtgggagctacaattcaagatgagatttgggtggggacacagctaaaccatatcagtgactacagtactatagcagttgaatagttttttttaaatcccttgagtatcttatgatctataaaatggcagtcaagcctatcctgtggatatttgcaaggcttataaatattgtctggaagagaaagatgacttaggagtatattataactcttgatgtttttattatatttgtcattaatgtgcacaaattataaatgtattatcattaataataatttatttaaaaaagtgatgggatatcataaaacccttgggtgaattcaaacatggccactttgtatgacaaattacatgcttctatttctgttccacccagggtttcttttgagcagtggaaattcatctggaaacttaatgttatcccactatagagagccattcttgatgtgccactaattctgccaaataggctgacttgactactctcttaggatacagaattatatgaagaaaaatagagttgagaaggaaaaagtacaaacgttgtgtgtgcatataacaaacagatgactgctttagacatatttggtctgtaaacacctgtggaatcttgcctgtgtctctaatttttccagattttgctcatgggagagacacaatttgttctttgaatgtagccattatattttaacatacatgctgatttaatcatgctggtcaaaattttctttttatagcatccagacagcttgtgcatataactacatgcagttttattttgtggccaactggcaaccatatggaagtcagttaaaatgtattttgattatatgactctgtgcacataggcacatcatctcaggaaggctcaggtagcatagaggcaagtgaattcagcctgagattacagtaaagacatgaatctgatagtctggcatttctggactcacactgatttcttgaagaaaagcccatacagttggaatcagtgccttaaattaggtttcttaatatgatgagctcataaaatatgtgttgtcctgccttcttcagatgtgagagttgatgttacagagatctctttggtaatatgactattttaataaaatattcacaattaaaaatatatagaagaaagcagcaaggaaagactagaactaatgattagagttgttgaaaatgcatacataatttactccctttttaaaaaaaatggaactgggctattctgttgtacatagacttttgtcaaaatcaaattaagaatactttactcagttttctttttcttcctttattcatctctgtaaatatgattttaaaggcccttgaaaacaaaataattatcttattaaaatttagttacatgttgtgtttaaaatgctaaagttttggccagccgcagtggctcacgcctgtaatcccagtactttgcccgagatgggcagatcatgaggtcaggagttcaagaccagcctgaccaacatggtgaaaccctgtctctactaaaaatacaacaacaacaacaacaacaacaaattagccaggagtggtggtgcgtgcctgtaatcccagctactcaggaggctgaggcaggagtatcgcttgaacccaggaggcggaggtcgcagtgagccgagattgcgcaacagagtgtgactcagtcttaaaagaaaaaaaaaaattctgaaatttatcggagaaaacaattgggatctatttttagtctcaaatgtaggcatatacaaaaataatacatagtagttttctaagtactattagacatttgtttcccattttgccatttgctttcagtttacctgacatgaagataaaaatgatagctatttctcacttggcatttgaaagacaagagcaataagaaacccagcaaaactcctagagaattttcatggggaaaataagcatattgacattctttgacttttgtaaattgattttttggctccagctgctctaaagccattaagagttagagttaatcattcttgatttttttattgttagtcagttcccttattcataacactgaataatagcaatactactgagttttatttgtgttcacattcagtgctatgttaaaaaattcacaaagtaacatactgaaattcttgcaggtaactggtaaaatatgtagtctttagtagactgttgattgatattctagtaaaagagtaaatcttgtgaatttcagaggtggtcccaagatggtcttaaccctactgtgttaaaaaatatcagcatctttttcctataaagacaacctgaaggctcttttgaaatatgtataagtgcttctttttaaaaaacttattgatcaaatcagcttaattagctatgaaaggaatgatccttcacccctatgttaatgtctgtttacactgtgagtttgtaaaagcttctgatagagattgatgccatatctaataaattatcccactatatattcataaagtactatgattatatctatatgaatatatatataggtgaatgtagattcatatcaaaaattgaaacccagagaaaaaacttggaatttggtaggcagaaccatgaccctcctcaaagaagtcctcaccctcatccccgaaacctgtcagtatgctctgtaacatgattaagggcaattaacattgcaggtagaattaaagttactattttagtccatttgtgctgctataacaaaatgcctgagactgggtatgtataaagaacagaaatttgttttctgttctggagcctaggaagtccaagatcaaagtgccagcaggttccatcatctggtgagtactgcatcttcagaggggaggggaaaggaacagtatgttctcacctggcagaagaacaaaagagcaagctaccaaacactgccaagcctcttttatagaggccttaatcgcattcgtgagggagcagccctcatggcctaattacctcttaaaggctctatctcttaaaactactaggttggcaacacctgaatttaagagggggcataatcaaaccatattattactaatcagttgaccttaaaatagataatcctggatgatctcggtgggccccttgtaattacaagtttccttaaaagtggaagagggtgacacaagagaagtgagagtgacgtaatgcgaacaggactcaacacaccattgctgactttgaagaaggaggcctgaatttcaatagccacggaaggggacaacctttagaagctggaaatggcaaataatactacccaaaagccctcagaaaggagttcaaccctgacagtacctttattttagctctgtgcaacctgtttcagactgctgcagaaccgtaagataataaattcatgttgttttaaggcactacatttgtaataatttgtcaaggcagcaataaaaaaccaatgcagcaaaagacaataacgtctgtttaaccacacagtcacggaacatctattaactagcaacttattaaatacagcttactgctgcaacatctttggtgtaattaaaacatcctccatgaatcagagtgagaattatacttaagtgtctgccaattgccatgataatagaaaagcttatgatctctctactaagtaccttaggaagacaagggcccaatgatatgagcagtgtggtggaaccccaaacatcttcccactttcatgcacacatatcattcattctcctttttcccaaggttcgctgttagtatagaggcacaatagatcatgattagctctgggcatgttcacagtttagctgcctgagcagattaatttgagagtccaggaaaagcttattaaacagattatgagaactagacaagacttttgagaccatctgtccaaaactttggttttaccagtaagcaaattcagacccagcatcactcagctggtaggtggtaaaactgagaagagaatccatgtattttgttttttcctagttctgtgttgttgcactgcataatgaattccagccagaaccacacattcagttcctgactagtccacaattagaatcaccatcaagtcaaacacaagtgaggcattacatccaggaggtcatagttagttgtgtgtgtgttccctagatagattccctgaagctttctcatcaacaccaagaagctgaaggggaaaatgaaagttccccttcagttcccctcaattcaagagtaattgagaccaacatcattcatggatattaataatatgaccttttttaaagaatcaccaaatcattacatcataaagaacaatgatcttatattttactaggtttattagttgcagtctcagcctctaggttgctagaaagctctgggctcctttggatatggacatggccaaatctctttaactttctagttatggcactttaggcaaattcaacttctctgagtctaggttttctcctctgttcaatggaactgacaattctatgtcagagagctattgtaaggattaaaggaactaatatttgcaaaccccatactgttgcttggaataaaacaggtgctgaataaatggtagctatttgattgttagttttaaaaaatcttgctagaaatcattaagagtgtatttatctaagtgggggaaaagaaaaacctaagtaagacccttggatcttgaaagaaagaaaaagagagaaatgattgtcaacacaaacagaaatgcttgaggaacttcaagggctcaagagtcaaaggacaggctagaaaaaaatgtcagagaagaaagagctaagagaagaaagtcaaaggaaaggagagaaggggagaatggaaggagaactgagaaaccagcagtgtttttttaaaggtgataactgaagaaggtgagcagaggaagaaagaacacagtgagtaattgaaatcaccagttattttcttctgattcatctcttaaaggaaataccttctaagagagatctttgctcttttgtgtgctggtgaatgtaaggtgagaatctctcctttctttttctaatgatgaccctgaacaaggccgtgctcttcttttaaacatctcttctgtttgaagctctgttacaatagaatcaaatagggtctccttggtttatgtcactgatctaaggttgaatgatgtacttgacagatccttttgaactgccccatctgggaactgaaccaaagactggatcgccagtcatggtactcacaattacctttccctttccgcacagtccccacattcactacccgaaagtataaaatccatctcataagatgcagatgaagtagaatgatgcggtttcccaaacttgcctgattatacaaaagcccagaagcattgctgtctggagattcggattcttacctcaaggtgattcttatcattagaaagtgaaaggtacagaaatgaagaaactttcgagtaagcaacgtttcctaccaagggactgggtggttctgaatataacaccatctttctcctaacaatagaaggtgacattttgacaaataagcttaggattcgtattcttccctaaggtatcattttgctgagctatcattttttttctttctttttatttttgagacagagtctcactctgtcacccaggctggagtgccgcggtgtgctcttggctcactgcaacctctgcctcccgggttcaagcaattttcgttcctcagcttccagagttgctgggattacaggggcccgccagagtttctggctaatttttgtatttttagtagagacggggtttcactatgttggccaggctggtctcaaactcctgacctcaagtgatgagcttaccttggcctcccaaagtgctgggattacaggcatgagccactgctcccggacttgctgtaagctatctttttgccactcatgatgatgattgtatggatgactctctggtctgtgttgtcagtattcaagtggtacctccactctgtcacatcttcattttgcttgtctagcagacttgctagtcccttctgtcttgttccatgtcaggcttggacatatgaattgcaatcacattgtgagacaattaattgtccaatatttctcaagactccctgtcctttagaaactattttgcattcatctttgagtcctcagtattttgcctagtaaacagggtttgtcaagtgaatatccaatatagactcaggaagatccacatggggagtgagaaaattgagcgaatcccaggaaaagaacaggaaatggaggtaaaagactcacgtaagtttacccttctatccaggcatgcctccagacaccagcttccacttccttatctgtctggaattggtgttgaattgatcttcgaggtcagtttgaggtttcttactctctatatgagtctctgatacttagaatgttattttgtgctcagattgccagaaatcatgaagaaatgaaaggggaaaaatggtggcaataatgatgactaacaatgttttattgtgtgacatgaagttaaacagtaataatttattgttatattgaatgctgcagcattaaactgctgcctccagtgttaaaagcaatgctcacaagacagatcttatgagaaactctatgtaacagcaaaggatcactgaaatattcagatacagaatttacaatagttgcattagggcttcctttgaattaattaatatttcctctgagatgactcctgccaagtggttttgcttcattcctgatttaattgctaggaaaatcagaattattccagaaagtgaggctatgaaggtttcattgtaggaaaatcttgtgtctgaagccgtgaggctggacaaagggaaatgagttgaatgctgttgtgaatgggcagaagtcagcaccagcaacttccattcatttcgaagtaagagttgataagagaattgactgttgaagtcaaatctccgtatattttcttatttccttctttgcatccatcttgcaaagcaaatttttaagagaaaacgagtgtttcattcttgatagtgaattgctctgcttcttcagcaggaggtgcaggagaaatcctatttgcatcctttccactgctcttaacaagcccctaaaggctgagttaatgtttatttgtggcctggagtggccaaaagggaatagcaggaattattttcttcatagaagtggtggagaatatgagtgcctccctctataaactggagaagatttacctgcacaattctcctctctgctttttagtactgcttgggggatgaaagggacccatggactttggcctcagacacaccaggctggtttcaaattttccttttttctgaaatccacagtaagccacttaaactctctaagccacagtattctgttctgtacaattggaataacaatgctgtgtactggaacagcttcataatttgtaggcccagtactaaatgaaaattgggacccttttgttcaaagaacatgaacttcaagacagtaatggcagagcatcaaataggtgtgtggcccttctgagcatgggggctgtaccactgggcaggccacataccacgaagttgacctcactgtgcagctggattggctgttggatgtcagatatctttccctttgtatctctgtatctcagagagtggatccctgaaaatggcatttgcactggctgctagctagatttagccatggaaggcagtagtaggagactgatggtgagaggcacggggaagccaagttatttccctcttttctcctttcccctgtctctatttccctttgaaacgtatctccaatagtaactgctctcctctttcagttccagcatacctaggacagcccaccttctggggtcccacctttcctgatcccactcactgctagtcagttctctgcaggcagcccagctcctcatgctctaaaaccaccatttccttggttcctccagcctgacaggtgctagctgcttcctgatataactaatatcttgactacctccctgttccctatgaggcatttcagctcttccaagcctctttaactagttccccttattaactattctttattcttcatagaatctgatataagtgtctaccttgaaaggttattacaaggaacaaatttgtctaaggcagtggttttaactgtacattgcaattcatttgtgagtaatacaatcagtttgatgggtcaagaccggtagtttagaacacaaaataacttagagcagaataagaaaacatggtagtgcattgtatgtattaaggtacatatgatttaataaagcttttagttgtctctgtgtgtatgtgtgatgtgtaccatttcatgctgtaaaaatgtattactttctagcaggtgggagaaggaaagaaaggccaatggtctaagacttctggtacataattagcactcaataaattgtagaaactattgttgccatccaagaccatgccatttaaacaaaaggcagtcagacagcccaaagagtttaccattccaactcactttagctcattagaatagtttcatgtagttgggccaacttgtactaaaatggccaaagcgtttacttacatttgtttgtttacacctagacaggcccagcttgagtcaccagccttggctgaaagagaagccagccaggttcaaagtaaagaaacagttttaaaataacattttatttttctgtgagtcatagcaaatctgtccctgcaacatctttctcctgcagctaaatgctttaaaatggtcaggtctcacccaggaaagtgggactgggaggaagtgatgcgataaaacagcttcccaatcagtgcattagtaggagtgcaacctctggcattcctcttttttcagaagtatcaaaaagctctgcagagataactgtgtctccagatggccatgagattggtaaatgacaaatgtttatcagcctttcagcacctgctgatggaagaactaaaaaaaaaatcgcaagtgactttatgagcccacagccaccccagctgtaatgggtgctagtagctctgtgttgctgacctcacatgggtaaaggaagagcagaagaatttttagtcccttggctacttcttatctatttcatcaggtaaggaaactcaacttgaatcctttcaactctgaagaatggtagatctgaggaacaacaaagagctataggtcatgtggatttctctgctcagtcagagagcccagaactctccctggagctgaagatagcccttgcaagctatctcatgatggttttatagcacagtgggctcactcatactggtgctggttttgagcatctatgttgacaagacaaatgtctgtttctactactgcagaggatagagtttaaccaaagtcaggtgacagagaaaaagaacagaaactgataacacttacacagtatccttatatagcaggctcttgaataatgcaggcattggggtgacaaccacccttacagtcaaaaatctgtttataacttttttttttttcagatggagtcttgctctgttgcccaggctggagtgcagtggcatgatcttcgctcactgcaacctttgcctcccgggttaaagagattctcctgcctcagcctcccaagtagctggaattacaggcatataccaccatgcctggctaaattttgtatttttagcagagatggagtttcatcacgttggccaggctgatctcaaactcctgacttcaggtgatccacccgcctcagcctccccagctgtgtagataacttttgacgccccacagccttaactattaatagcctatcattgactagaaatcttactgataacagtcttttaatgcatatgttatatatatacattacactatattattacaataaagttggaaaataaaatgttattaagaaaatcacaaaaaaagagaaaatatatttactattcattaagaagtggaaattgatcatcataaagtcttcctcgttgtcattgtcttcaggttgagtagctgaggaggaggaggaagggaatgggttagtcttgctgtctcaaggatggcaaaggcagaaggaaatccgcatgtaagtggacccacgcagttcaaacctgtgttgttcaagggtactttatgttgtccgggatgctatattgagtactttatacatataaatttacttaatcctcacaacatgcctacaaggtggatactactattgtcctcatttccagctgagaaaacagatagagaaggcaaataatgtgctcaaatctgcacagttaattaatcatagagcccaaattcaaacaaaatagtgtggctgccaagtcaatgctcttgacctctacccagactgggagccagagggtttgcattctaattttatcattaaccaatctgactgatggggcaaatcaaccctactgcaatctcctcttttcatctgtaatataaggttattgcttgagatattttcaagtcttagtgccacctcccatttagagctttagtgttgagaaagatgatattaatgtattccgttgtcctaaatatttcaaacacgtcagtttctacttttccagacaactccaatggggatatttttttattcctccacttcctaattaaggctgaaagggccccatattcagctgctgagtctctgtctcccgccttcttttcctcctgtacgacctaaaactgtcttttgtctttcagcacttggggagaaactctgggaagctttctaaatccctaaatttgtcacacccatccttaaagcagtgctgaattaaaaagtgggattcgtctaagcagaggagatacttaaggaaggagaggggctacagcactaaatgatgtttccaattaagagaagtgtaaggtcagagagaaactccctcctggatggagctcttcaccacctgatgagctgattaaatatcatgccgcaaaaagtaaatgtttactccaagccaggtgcttggactctaaagaactctattaggcaagagtaagtggtttaattggctcaccttcattcaactgttagtatgttcctcataagtgcctgtcagagagaatcttttgtgtttcccttctaacagctggctcataaaaacataaactcatcttacaatgttaagtaaggatcttttaattcctgttttctttcctccaatttgtattaatatgataggagagaaagaaagtgaaagcatgcttctatagctggctacttcatcaaacttaatggaaccatattttgtaattcattctataatttaagttttggtcattttatctcttaaagatgaattccaggccaggtgcagtggtttgtgcctgtaatctcaacccttgagaagccgaggtaggatgattgttagagcccaggagtttgaaaccaaccaatatagagaccctgtctctacaaaaaaaaaaaaaaaaaaaaaaaagtcaggtgtgatggtatatgcctgtagtcctagctactcaggaggctgaagtgggaggattgcttgagcccaggaggtccaggttgcagagagccatgatgatgccattgcactccagcctaggcaacagagcgagacactgtctcaaaagacacacaaacaaaaaaatatgaaaccctagctaaacactgtggactcaaaataacctgtgaaatcacccaaccgtagtatttatctatgagaatgtttcaaagggagatatgtagttgtatgactatttcacgcagatatttgttattaataaaagactttgtggtcagcatgacgtgttagctacagttgaatccatgcttctttacattttgtggtttggttgttgtcgaatttactttccatgcattatttccaaatatatacttattatttcatcagcttagaatggtttggatagaaaaatatatcaaggtctcagaaatgccccccattaacataagggtagccatgacttgaacccaccccactggtttcctttgtctttctccatttctgattctctttctctgtggttacctaggatatataaattacttgactttgaaattcatgattaactcagaaagttatagctagtgattcacaatatttgttttaaaaacagtatgaagaatgtagaagcttggtttttaattataataatataaattagtatcattttatgtactcaaatgccacacacatatgtataaggcattcctatggaataatcttaacctggttctttgacaatttttgtaattcattctctagtgaaatatttccccaaagtgtatccacagattactatctcaccaatatgcttccggaaaaaaagtgccatggtctaataagtttaggaaaccttgcacattctttttccttgggatcaatcattagtattagcagatttagcactaagaaatcctgtagtagagaaattcatttacttttaattcagtatttctcaaaatcattttaccctattactcaaatccctgcttttattctgggaattgttacctctcctttcctttgcatacacttgagaaattgactctagaaatactagccttatgaaatattgatagtaattgctatggtttgttagactcctccaaatctcttgttgaactttgatccctagcattggaggtgggcttaatgggaggtgtttgggtcatgagggcagatccttcatgaatacattaatgccctccctggggtgggtaggaactgagtgacttgttgctctattagtttctgtgagagttgtcccccgactcgccgcagagctggttgttaaaaagagcctggttcctcttccccctctctctcttgcttcctctctctccatgtgatctctgcacacaccagctccccttcaccttctaccatgagtgcaaacagcctgaggccctcacagatgcagatgccagatcattgcttcttacacattgtgtagaaccatgagccaaataaacgtcttttctttataagtaactgagcctcaggtattcttttatagcaatacaaatggacgaagacagtactgattatttgttgggcatttcctatgtgcgaggaactgttacaggtattttggcagttgtaatagcgaggtatttattttggtgctttaacagagactaaaatggctgctttaaataagattgattatttctctctcacatgaaagcctaaaatggtgagcagtgtagcaacttagggcagcaatctttgggtcatccaaggcatcagataccttctgtggtgttgtttcaccgtcctttgaagtgttcctttcttcataggttgaaaccagctccttgtacctcatctggtcccatccctaagaaaagagaccaaagagccatccttgagaaaagagaccaaagagacatccctgagaaaagagaaaataaagggcaaacagcttcttgttaagaatctggtctggattatgctcatagctcattgtccaactgaataaattgctcaatttattgagctcataaattgctcaatatgacatggccatacccagcttacaaggaagtccaagaaatagtctcttattggggaacatttgctctcctgaaacatagaaggttctattatttaataggtagaaggaaagaatgagtattacaaggcaattagctttctctgctgtgtttttacctcattaaatcctacctacaacccatgaaatcagtactttgtcttcattttaatatgagaaaactaagatacagagaaagtaaaactaaagtcacgtagcgactattcgcttttggttttgataccatgctacctaattccatagcctgggttcttagctgatacacacagttgcaatgcctttccagaaaatttctagtagtttccaccattcctggacctattcttttctaactttaaaggcaatccatcttctaagtcagtgtggcagagactctagtttcttcacccaaaccatgttctcctgtctttcttgggctcatgtttaaactatatttctcatcttctcttaggtattaccatatgactaaggtctagtaaatgcaatgtgagaagatctgttgtataccacctccaggcttggcctgtaaaaacttcccatggacatgagctcctccatgccctttcccctccagctagatgaattggaaatgacacccaggacaactggaaggccatatgtcaaaatggacaaggcttgctcaccctgaattctagaataattttgtggaggagaactaccctaacaatctgttttcccacctagcaaaaaaaaatgtgaccacaaaaataaacttctgctgtgtttgatccatttgaaagtttttgatctattagttctagcagttagcttcctctaaaaaatacaattgattaccatgatgtcatggataacaagttggcaacctgggtcaaagtcctattcttgtttttttctagtgataagaccttgggcaatttattaaatctctccaagtctcagttttctcagctttaaaataatcttcaatcatagtgttgttctaagaagtaaattagtttatcttaaaaatcctattccctgttaattattccattctagcaatcaatttgtgcttattctagttgtcccactgtttaaaacacacatgccttagtattatgaaaacatttcaaaagaaatatgtcttagatttctacatttatattagaaaactttcaaatttatacttcatgccttttaaaaaaataatactagtaaaatgaaagaatatcagttttggaatcattccacagtcctggataaaaatacctgttagaccacttactagtggtatcatctatgtgagactcaaattcagcatcagtaattttggaagaatggtagtcctactttcagaattgttaggattaaataaagtgctaaaagtctgtgaaatctccttgcacactgatgatttcccttctctccccaaatagatttccatatggagcacttttagtcatttttgctggactgcaatcacctttctttcttcaaatgttaaaactgaacagtagtagctagcaatttggaatctctagaaagaagttttttttattattatagtgctgaagctcagctcattctctcaaggagcctatggatttggagtgcatcataagggaagaagttaacctcctgctgtattaccagagaccaaggacaaatgttggttgtcacctgcctaaccaggcaagtgatagtcacagactgtccatctcacaacaaaacaatgctaattttgttgagggatagaaatgttgtagttgatctcattttctctagcacagtgtccctttttgaatgttccttctcaaatagggcatggtataaactctgcaagaggggagttccatttggaagacatgtaggcaaacaacattcaggctccacacccacttcgcctgctgagatttgacttattacacaactgcagatgctggtcaattagtttctcatactcattcgtatcacagaagggatgcagtggttataaattgcactgattatgcacaccttggcttaccctattgttgcataaaaataggcaaggcatgttagtcattgcatagtcttttcagtagaaaggaaaagtgattgagaaacagcaaggaaaattgtgtttacagctaaggtttttgttttgttttgttttgtttccactccgttcagtgtgtatataaagttaatgcatttttaacttaacagcaaccaacaacagcttcactttgagtgcatgaaaaacactggggcttaagtgttgatttgttgccaggcatttcctttgggaatccatgtaggctgatcatttacctgggaaatcgtgtgtgtgtgtgtgtgtgtgtgtgttacctttacctttgtaagggacatcataaaacctcaatttcctggtgtgttccagttaattttctgctttattgaatgtcactctgaattccctatttcctttaacttttgtgttgaaaaatcattcaaaagactactgagccattttcttcttcattaagaaaaatattgggttagacttaattcttgatagctgaaaattttggagcattgttttgtttgtttgttttacatttttgaaacaaactattttgagaccgtaataagaacaatggataatcttcccagaaatcagagagagaaagagagagaattctgcataaatttatagatccttgcagcccacatttgaggccccagcaatagaccccaggttaagaattcctgccatagagtgttttgacattatcattctaaatatttaattttgtccaaataaaaatatagacagagaaaagggaacttagcaaaaatcttcatttacattcaaaacaattcaaggtgcattaaaatcatgaaaaactttgttcctctataggccagggaagtttcttgctacttatttcctttattaaagtatattttattgatttgtctttttcttttaaaaacagaatatccaatgggtaagactgaccaaagatttggggaagttgattctaaataggtgagctgtgttttaagagttcttcttagtactcttcaactcagcatgtggaaataaatttcaaaagcttttcttaatttcacaaaaacaaatataaatagttatggggggaaataaacaacaggccaaataccagatggcaactcaaagcacattgtctgctctcttgctctaagctactggttctcagtaggggtgggacagctcccaaaagggggtctttgggaatttgtggtgggtttttggtagtcacaatgttaagaggtactataatagctatttagatggcagagttaggatttcctgtttctttttctttttggtatccctcatgactatatagtctccccaatatattcacatgggtgaaaatcctattcgtaatgattgaactcaattataactccatttacagataaacatgcacaaaattttcatggttttaatacactgaattttccaagggtgtgtgaaattgctgtacatattgacagaagattgttgtttgatttggttaagaactttttattattattattattattattatactttaagttttagggtacatgtgcacaatgtgcaggttacttacatatgtatacatgtgccatgctggtgtgctgcacccattaactcgtcatttagcattaggtatatctcccaatgctatccctccccgctccccccaccccacaacagtccccagagtgtgatgttccccttcctgtgtccatgtgttctcattgttcaattcccacctgtgagtgagaacacacggtgtttggttttttgtctttgcgatagtttactgagaatgatgatttccattttcatccatgtccctacaaaggacataaggaaatgtggcacatatacaccatggaatactatgcagccgtaaaaaatgaagaacttttttaagagttatttttcactttagaaaatcagctagagaccacaatgctgtttatggtattgaagtccccatgagaatgcacctggatcagtgtacatttgtaatgatcagattcacagtgattccatgtgtaggtataagcttttctctacttcaccatgtgtccttgtatagttattgataggggttggctgtggccccctcccaaatctcatcttgaactgtagctctcataattcccatttgtcatgggagggacccaatgggaagtaattgaatcatgggagcaggtctttcccctgctgttctcatgatagtaagtctcatgagatctgatgattttataaaggggagttcccctacacaagttctctcttgcctgccaccatgtaagatgtgactttgctcctcatttgccttctgccatgaatttgaggcctccccagccatgtagaactgtgagtcaattaaacctctttcctttataaattacccagtcttgggtatgtcttcattagcagcgtgagaacagactataacagttatcctgcatcttaacatatttcaatattatttattatatacttatatataataatataaaaatattcattgtgcatttatatatcataatatatatattatgtaatttttcattctgtcttataatttattctaaaaattatatttttaagttaatttataacttattaagtcagtgtttctttaggaaatgtgccctccgtcaaaattttattctttttggtctctttgctagtatgctactagctaaagaaaattcattcccactaattctggattcttatagttattcacagccatgctgttaaagagacaagtgaattactaccttctcagagttgaactcaagggggaagtttgactattggctggcaaaataaagtagtggaaatttatttcttttgttctcaataaaataacctgtgaaccatcctaaaactaaaaaaaggaaattatttatgaagagaagttgtatcatttaaattcgttttctctcttttccctttatttcagaaaccttccataataaaaacttggatataatgaaattttgcataaatgacatgtgacaacctaatttagtggaagccagggaacctgctaatactttaacttcaaagctcttccattttattccttcattacttttcctcctttcaaagcattctttagccatgcaccaagttcgaacaatgacgaatcaaatcctcagagccaagaacaatgttctaatatttccatgcaattaattgctacttcttggtgagcatccagtatacttgattctctcatagaagattctccaagcctgacactcggttgaagtctgaggacttcactgaggacaaagagggatcaaatcttcccaacaaacagtgaactcaccatgcaaagtgaatagaatcccctaatcaataaatcactaaatatttatggagccccgaaatcatattgtgacaagatttttcaaaaaaaaatgtagaaactaagttatgatacaatcacatgtcaggaaggtatattggagtactacttgtccaggactccactgacacccccttgtgctccctatgtcattttgatgtaccaggccattcactgtatctataacgtgaatttttgcccctattttcaatgtcccccatcctattagcttttcctttccagtaaacttctccaaacccttcctcagtgtttcaaaggcaacaaaagttatcacaacaaaagtaactagtatttcttgagtgttcacagtgggctggacaagcaaagtgctttacctgcattgcctcagttaattctcttaataacctatgacatcagctctattattaacctcattatacacatgggaaaatagacactactatgggctgaatatgccccctccaaaattatgttgaaactaaatccccattttgcagtattaagaggcagggcctttttgagtggccagccttcatgagtggattagggccttatgaaggggctggagaaaactaacttaggccctttttgcctttctatcttccaacatgtgaggacatagcatttgcaccttctaccatgtgagaacacagcaagaaggccctcaccagacaccaaatgtgctggtgccttgatctttgacttcttagtctcagaactgtgagaagtaaatgtatattatttgtagttacccagtctatggtattgtgttatagcaacatgaagccagacagaaaaatttacagttttcatcacttggcagaggtcacataacaggtcgatttgattctcaagccgtctttactattatgcttacttggcttttatctctgtagactttaattgctgagttatctttccctgagtcattgctgcttcaaatctcagtctttaggaatcacttctgtaatctgctgattaattatgcatagatcataaaagttatttaatccagctgctgtccagagtcaatatcactatcctactcaaaaatctgcaacaatctaccacgaaaaatcaattctaaactccttagtctgacattaaacagcctgataatctgatccaatccagcctctctgcttctacctatcttgtttacctgtttgttgattcttattcaattgcttccttgatggaggactttcccacccactccatcactacctcttgtttctgcctgcacacatcatttccccaagtcttttgataagaaagatctcctttttacaactatttctctgctctctcctctccaacatatcttcctgacatgtgattgtatcataacttagtttctacatttttttgaaaaaccttgtcacaatatgattttggggctccataaatattttgtgatttattgagtaggggattctattcagtttgcatgtggagttcactgtttgttgggaagatgtgatccctcttttctctatgcttccatcatgacctggatatacttctagtatggccctttctaattcttcacatgcatgccttcactggactgcagactccaagacaggggccatgcagtattcatctttgtgtctttccagttactccacaacaatttattgagtgaataaagaaaatgctgagaaacgaactcaagaggttttgtagatttaataccattgctctgggtatcgcaaaagataatggctattaatgaattagtaccccacttcccaccacctcaccctgttgacatagtatgatagaatgtgtaaccacttaatctaccttaagatgctattgggcaacaacaatgtcttgactttaggggctggaaagcaaatagtatataatgtccaattgctcttgtttggggcagagagcacagatttaagaaacaaggatacaataaaatgaaatttggctgcagtacaaggttaatgtctctcctcacctcccaaagagtaccaagggatcattcattgtcacagctgttggggtttagagctctcttctcatccaaatgccagtactttccacaaaaagctcttccccagggatgccctaataagccagtgtgtcctgtataggtgagacttgccctggctgtctctatccaagtggtgacataagctcatctaaagcctttcattaatgcaaacaatgacccagcccatggtggcactgattcttgaagctgaagacttggagaaggagcctgattttccatcacactgattgttgttttcagtaagatgtttagcttttcaattttctctctgccaaatacaaattagtgtatttccaacatcccagagtcttagctgtgcattgccagcttccactgcttctccttaattaacaaacagctgtagaagagcttctcaactgacatggggggaagagctctaaggaagatatggactatgtctcatatcttcaaatcctccacagtcatctcctgttagatcaccaagaagaaatgcccagtggagacacttcagttcaatgaaaagtttatgactagttgggtttggtctccattttgtattaatgtagttgggttcagtctccaatctgtatgtatgtagtttcctatcccagagagcaggacaagaccatataagctctatttatgtttcctttgactctttagctgaaagcctaggatgtaggacaagtggctaacctgttttagaactttcttcctaggctaacattctgaacttggccttgtggattttacctcttaaactgcaccaaaaaccatggaaacaaagggcttacagcagtgttagcctaatctgagccctctataccttcctatactgtggccacagcagtaaagctacgtggtcttgcaaaagaccttccaagagaaggttggctacagaccttgcttatcacaccatgaacctgaggaggaaagaaaatactcacaaatagtttagcccctttcataaattgttggtccttaatccatttttgaaccctactctgttgggtggaatgtgtgtgtatctgcacgtgtgtgtgtgtgtgtgtgtgtgtgtgtgtttagaaattcaaaaaaaatgaggagatcttggtcttccatagagggaagactgcattatcaatagagtctttcttagcagaggatgaaggctcctgtagctcctaatcttcccatttgtgcacaaatacgtgaattctgattaggttgaaatcaggaagacactcttttgctgcttagtggccacatctagagctaacaacattatcagtgggatggtgattcatggtttaagaacataccctcgccattccagctactcgggaagctgaggtaaaaggatcgcttgagcccagagtttaaggctgtagtgtgccatggtaacacataactagccactgtactctagcctgagcaacatagttagaccccatttcttaaaaacaaaacaaaaacatccttctcctcttctcctcccccagcaattctggatggctcatctaataaagtacatatattttacctaatctagtcaaatgtaatgacacaataagattattattattctccaatccctgctctgcaacatatttggctgaacatttttggctgcaacatttttggctgaagagaatgaggtttcttcctccctgaacctgggaactaacatgaggtgttttcttccacttggtggagctgtgcacatgtgtgcttgcggagaaaaagaagagtcccagcaggccctctactccagctgttggagattgagctttccagtgcattatcctggctttatgcagtgatgccttccccctgatggcagtaaaattttaattagagggcaatgtgcattcctatataatggagtgcacacatggcaggaagttaacaggacacgtttgcagttccagtttcattgtcaaccagctgtgtgattcctggcaatttgctttattttgttgtgtcacagttcttgactaggtaaactggagagtcatctctggtctactttcctcttcagtttggtggaagtttcacgtaaaattacatgtgaaagtccttgagaattgaaacaatgggcaaatctatagcagaatgcttgttgaattctatcagctttcccaaggtgcaggctgcccatgtttagtctttctcactttccaatccattttccacactgcagccagcgtgttttttctcaatggaaatctgatcatatcaacctcttttttaaaaaaaatcctaaatatcttctccctctcacagaataaaaatcacaattccttaagaaactgtcaaagccttctcaatctgtgcctttcatctctgaccattggtatctttcttctgataggataaaagttcattgaatgttcaagccttctcttttgcttttcagagcttggccatgtggttttctctgtctgaaacaagcttcccccattcctttctaggctaactcctactcatcctccaaatttcagcacaaagtcacttacagtgggaatgcttccatggccctctattagcagcctctgatttatgctcccacaatagtcggttctgcctctggaccatgttttatcctattgtttttcctccataagagcacagtcataatctgtataactcagtgttgtaactctggcagctagcacaatctcaggttcataaaaagagctcaagaaatatttgttgaatgaccaattagatggcatattcatttcctagggctcctataactaacgctagcgtggtgccttagaacaacagaaatttatcctgtcgtacttctagagggtgggggtctgaaatcaaggtgttgtcagggctgtgcttcctctcagattctacacagaatcttcccttgcttctttggtggcgatcagtcctttgcatgctgtggcttgctgctacatcactctaatctctgcctttgttgtcatatagcattcctcctgcatgtctctctttgcacatggcattttcctcttataaggaaaccaatcacattggattagagcctatcctaatggcctcatcttaacttgattacatctgcaaagactctatttccaaataacgctacattcacagatactggaggttaggactttaacatatcttttggaggaggatacaggtcaataacagattgctaaaccaattaactaattactaattaatataaattatgggtggaaaaagcttccccagatcacgataaaaagctgtgtcgatctaatcaacgtgcttgcttaaataaggcatgtgtataatatatatgcatgcatctgtgtatatatacatatgtacacatgcattaattatgttgtgcaaaaaccccaaaggctatttatcccaaatagaaaatattgtgtcgtttgtctaaagcactttaaagacatctgcctttttcatatgtaaatttcttggatgacaagaaattactgctttgctagcttttaaaacactaaattatgataatccatcaccaaataaactataagcttctatcatttaaaaaatgtaagaactctgaggttagtagtagtttttagttgccattgaaagacggcagtttaacgtcatcgtttattcagatttccaaattaaggagatctctgtggttagacattcctttcgttatcactctccttttcttcaggcctgtcatttgtccattgatgtcttttccttccaaatgattcatgtacacattaggtcttttccctaagcctcatattatgaaaagcaaagctacatgaaaaaaagcaaatgattgctaaattatgtcctaatttctagcattcagcagtgctaaaatgaagcagagaatttcacaaaattctcagataaagtatatttttaccaactaacattgggtaaaagggactgagatagagatttatttttattattattaataactttgaaaatggtgcatttgggaaactacttactaatgttcattggaattggtggtaatactgaggtcaggatttaattccaggcattacccaaaaagtccatgtttgccttgtttcaagcctagagttcttaaaacaatccctgcaaggaaccaggcataaattatctttcagattggtgggcgtaggaatctatactgcgagctaactgtgctgaaatagacattttagaggatgtgaatgtctatctcagacaaaggagattacaggttattaaccaaggcacttttcaaatgccatccctttgggctttcttacttagagtttcagattcatttagccaaataccagccttatcccttccctaattttcctaaatatttgtggctgaatatacttttagctttaggagtgcagaagactttgagggaaagaaggcagggttgaaaaaggatgagtttcaggtcattacattgcttcaaggcagtttgcagcttgcattcatatttttaaagtctaaattagagccctttaacaccaactatcttgggcacacatgtatgtagaagcataccaccatatggcaaaaggcagagttgctaaaactataaataacaaagaggaaggttaattagcaaattaattagctgaattctatacaaggtactaacaataccttaatttccagatacatttgttatcaaaaatgtctaccttaataaagctgtggggacttactaagtgtatttgctgggcatggttcccagttatgaaatattaataccttgaaaaataaaacatgcttatgaaaatgcagttatgctctcattttcagaggaatatgtaagtgaggaataatatagaaatcctaaaacaactggaaattcagactaaaatgaagtagactgtagttttgtcattgcatgttctgctcatactaaagcacctatcctcccactttaccttctttaaactgcagggcagagagttatatttttcatcttcatgttgagtagagaatccatgaaaatctaatacccagttatcactcaagtgtgacaaatagaaaggagcttcagaataggatcttcagttctaccaaatgtctctgcctaattacatcaatatccatgttgatgagtgtacaaacctgtggctaattatattttcacttcttctaagggtaggtacactaatgtgtgatcccacagaaaagggcatgaaagtaaattaaaggtgtgtgccatgtatattaatgcctttgtggttattattgctattgtcttactcccatggatattggaggattgttgataagacacttaaatgttgataaggcacctaatgagtatcctgtgtgataggagtagtacacaatgataatcatttccttctttgtgcattagtattgacatagccactaatcaggaactgtaaactctaaacttgtatctgcagccctcttattaaaaagattcctggatttttttccctaagctagaaacagacagacaaacaaaaacaatgattaaagggcactaaaagatatatttaaaggcagaggtttttttcctatgtgtataagattcaaattaaattcctctttttggctatttggacagttttggcaattgggctgaagccactatgtttttgtcataacaggtcaaggattgcttactcatgtttgagaagcaataatgatatggcaagagagaggtaagggactacaatgggaggcttattaggaattgtgcatgcctctttcatgtgtgttgtctccaagctaaccttgtgaggtacgaattatgacttcttcctgaaggagaaaagcaagttttagattaagtgcctgacattctgatgtcataaaaagactgaaataagcaacattttagcacaacatttgaacagcccttttcttaaggataagctctttgctctacaccatactaatttccaaaaaggtgtgagattgacatatgaaacttgtacgtttatataaatgtgaatgcagcaagccagagaacagaatgttctgtagcccaggcaagaggcagaggaaatacccagtgacagatctacttggccctcgactaaaggggcgctgtaactttaaaatactaataaatatttagcttggctttttctttcctatttgctaagtcctgtcttgattctctggctaaggggtgtaagaaagtggctgtttgtgataaatagttgtgtttgtgtgtgaatgcatggaagaacacatctgagataatatagtgtttactgctttgccattagcacaatgggctgtctttacagaatatgatgtttaaatctatgcaccagtgcactttcaaatagagaattcgcttcctgttttcacttaaaactctctttttattttaattaacgaaaaagcagtttaatcatccatctttgcagctaaggaagttttacaggcttataatactgtcagattctgcggtatataaatgagaaatagacacttttggggaagaaattggccagtcttccttccttccttcctttcttcctttcttctttccttcccactcctcccccctttccccccactctctctctctttcttcctatgaagagactgttctaaaagctaggaagtttcattgatggtgtgtgatttcacaagctggattttatttcagaacacctgtcaaattcagagctgtctgaagcttctccaacatcattaccccagggctcccagttctatgcacatgtttttataatggcaggaaaaagaattcatatacgcatttgtgtgttagaatcagtggtgtgctggtgtaacaatcagctcctagagggtgaggcagggtgggtaggggatgtttagaaaaagtgggtatggagaagtccctgaattctagtttttgccaaattctgtgatgcaaatactcccaccacagccaatttcaaggttatttttcccagttacatttaatcagggccatacaagatgttacaagaaagaaaatgacaggaacccatgtggttcaactgatactcactcaggagctgagatagcatttcatttatgcaattcaaatagctattggtttggataccttagtattgtttcttccaagaaatattttcattctttcctaaagggataataatagacattcatgacctaatttaggagataatcattttttattttatcactcattattaatgcttcatacgaaaactagatttatgaaaaggcccatggattttacatctattatatcatctcctgttggtttgagaatgaaatgtttgttttgctaatatgtttttctgattaagaagtggaggcagcaggctattaaaagtttttctcaaggcagtaaattggtagactagatatcttcaaattaaaaagtagtgatttcttaggcctgttcatagattattcaaaaatgggttaaagcacaggttgaaaatacttttatgggccacaggataatttaagtgattatttttcagccacttttttttggaaaacatatattagctaatgtctgtaactttattaacttaaaaacaaaagtccagataaaagaattttacactctgccaagcagtggtgcccagcttataggtggttggttctgcatcttacattttgttacttgtaaggtctatgaagaaaggactcccttttctgccctgctcactgtcaaaatttcagtctctacagcatgaagactctacatatagaagacactaaaattttttttaaatatatgaatgaagcagttaatttaaggcagcaaagtcacgcctatacattatttctgtaatgtttaattttaagtataattgcttattaagtagataggatgcttagaaactatatttacctggaagtggcttaaaaatttccctatagacaaaaaatataatttgaagtagttcgtcttcaaaataaaggcctccagatggccagatacctttcatgtacatgcatcaattagactgtaccagaagataataaaaagaatcctattgttttaattatctcttttattctccaaggaacccctattcctgccaattcttacagacgttattaaggcattcagttagtttttcattcatttatttaaaaaatatttatcatgccaagtactatttaaatggtggagataccaaagtgaatgagatacatacaaggggccctagttctcaaggagctcacattcatgagaaattaagttcacacatgcaagatataccagatattaataagtattactcagatcattaaactagaatgaggccaggcacagtggctcatggctgtaatcctagtgccttttagaggctaaggtgggaggatagcttgagcccaggagttccaggatacagtgagctatgatcactccactgcactccagcctgggtgatagagtgagaccctgtctctaaagaaacaaacaaacaaaaagtagaaagatttgacctgagaataactagatagctattttagatcaggtattcatgaataaaataacacttaaagtgagatctgaatgacagaaagaaaagccatgcaaaaatcaaggagtagggtgtgcagatttcacagatggcaaatacctaacatggtgatgctaaagtcagcatgaacctccttctgtttcttgaacagaccacaggctggagaagaaaaggtaggaagaaggctggtataagatgagggtgaagagagaaccaaggccagatcatgggagctttatagccaggctaaggtgtttatgtttaattctaaatatagcagaatacattggagaagactatgctgaggaataatgtgacttgacttaaatttttaaaagactacctaactgtgtatggaaaatgaattgcatgggacaaggatggaaactagttgggagatgagttagaagattattataggagtccttgtgggaagtgttggtgactgttggagggtagtggtggtagtgaagatgcataggagtttctgagcttgttttggaggtagaggaggcaagatttgttaaagaactggcttagcagggtgggcacaaaggaaatacagaattaaaggataattccaaaggttccaacctgagcaactaagtagaggctggcatttactaagatgggtgagattgagagaaggggagtatcaggaggcaagattacttgttattttttagccatgtttacatttttttgagatatcttctgagtatctgagaagaaatttcaagtgggcaatttgttggacaagtttttggttcatgggagaaattaggacatggatgcaattttgtgagcctgtaacacacagctagtatttagagctaagggtctatatgaaatcacctaaatagtacttatagatatgaaagagaaggacagagcccaggggtactcttacatttacaggtgagcataaaaaagaaatcaaaagaaactctaaaggatcaaaagcaaagtagaagaaaaccaaacagccatgcgggagtgattgttgagatgttttgaaaaagagaaggttgacagtcatttaggaaggtgaggaatcaaacacagtgcagatgagggtggtgtagggagatcattctctaggtgccctttgcatttttgctcatcttacgatcagagtcactaactctcttggttcaggagttggaagatacagtggcctgttccagagcaaaggcaggttcagttgctgttcaggataatgaagataatgcctcccactgaggcaaagatcaacagagcttactgcccattataaaatattcagattccttaagcgcatggttcctctcctataatacaaacctcttgcaggtactgttgtcacctggcccttttcatatcaccctgtgaggagtggggcccagagaacctacacaaatgcaaacacttcaaccactgctattgtcataaagtccgtggtctctgacccaaagtctcatgtcccctgctagcatccatgaaacagtggcaggtgaactttgaaaacaggataggctaaaatctcagatccttcactactcttcacagatagtaggccattgtgatggtctacttgagctctgttgttgtggtggcatatctttctgtaccgatattcagttggtttgatgcaagcatggtacaggtagatgggtttatgccttagatatttaataagaatgccttaacacatgatcatatgtcttctttcttcactgacaatggcaccccactaatggagtgtgcaaatccaggaagaccagtgtttgaacgttgtggggtaaagtgccgataggtaagcccgcatatttagatatttctaagaggttctaaaatgatgaatactttcctcaatcatttgtcacaaccaaagtctatattcttatgcttagatgtcataattcatattaaagaattgggccttatataacaccttaatattaatagtacttggctaagcacagacgatcaacaacacttaattaatgaaactagttctgaatacattatatactttcagggtatataaggaggtaattacattttacagaggcatatactctatatctggtttattcgattgtgaatcaataaacatgggggttttttttaaaacatgatttctatgatgaatttttaatttaattgtaggaagctcctttaccgctgagtcaccagtgtcttcttgtataatataaagacattatggcctggcatggtggctcatgcctgtagtcccagcactttgggaggccgaggcgggtggatcatttgaggtcacgagttcaagaccagcctggccaacatggcgaaaccctgtctctactaaaaatacaaaaattaggcctggtggtgcatgcctgtagtcctagctacttgggaggttgaggcaggagaattgcttgaacccgagaggccaaggttgcaatgagccgagattgcaccactgtactctagcctgggagacagagtgagaccccatctcaaaagaaaaaaaataaaataaaagacattagccatctggagcagttaagtatatatttttctataaagcaatttaatgtagatgatattttctctctgtgtgtgcacaattgcatgcatatgtcaagtgtcgtgagattccaagtatttgacgatctgcttcttctatagacagttgggtacataaaaggagagccatgtgcaaatccagtctctggttctaggtttatacctcctcttctccacctccgctttccttgataacccctgatgcacacagccagccatcctcatccctcgagatgtggttgatttctctctatttgggtttcaggaaattgtttttcctcccttctgagagtctatgcgctgctgcaggccagtcagtattgattcaattctgggtgaatcctctctcactctttcctaagtgtatattgtatatgtagttcttctgccaaaagcagctttgtattaagattgtattaagatttaagttttcttaaatttgcaagtcacctaaaatatatcctgtgtctgctgggatccttttgatgttgaagcgtcttggagtagacaatagaggattttcatatggtggaagaatgttaggtgtccttgttggagaagagaggaagagtagagaacccctttaaagccctcttactgcctgttccttgcatctcatctctacatatttagcaatcacatctgctgatttggcaaacactaacagcagctacacagcgtcagtgaggacaatagtgagtggatttaaacatcaggggcgatgtaccagtgcaataaatagaatatatcattgtttcactgcggacagaatgtctgtgctctctatgaggatctgcatttaagcccaacacccaaggaaggcaaacatctaaagctcagcatggggtccttcaagcaggggaatacaaacaaagcatttttctcccaaaacacaagttttaggatttcatgtcaaagacatgctgccaatcagaagacagcattcccccttcttagagctggaaatggtaaccaggacacattggtatgcacaattctgctggctcagagcacacgcaagctcctaggctgtgactggcaggaggctcacagcgatttctttttttttgagacagggtctcactctgtcgcccagactggagtgcgcagtggtgcagtcttggctcactgcaacctcagcttcccaggttcaagcaattattctgcctcagcctcccaagtagctgagtttataggcgcccaccaccaagcgcagctaactttcttgtattttttttagtagaaacagggtttcaccatattggccaggctgttttcaatgtttttgaactcctgacctcaagtgatccacccacctcggcctccctaggattataggcatgagccaccatgcccagcaagctcacagcaatttttaatgcaatatgatcagacctaattttggctttttgatttcctcccttaaacctcaggcaggcactttttcaaaagagaaatcaatcagtcaatcaatcagtcaatcaacagtgagtgaatgaatgactaaattgtttgtttttagcatggcataaaataatccttaatattttgacctcaagcaaccattctgaccatatcttcttccatgcgcctttgactgagtacccagatacatgcagagtcaagttttctagatcacagccttgtcctctaattcagtgccttggtatgaaatctttcttcttctatgtcctttttttgccagatgaaatttcagtctttattcaagatcaagtgcaactgtctctttgaggaaagtcctttgaccgccatttctccccttcagaaggcaaacacctgggggagaagatctgcttaaggacctggtaactgacaaagaatggaatgggagcgagaaccgcctagccatcccttctccttgcacagtcatgaaacaaaagttgaaaaggagcctggttttacttgaccagtcataaattaccataaaataaaatgagatattaggaacctttgatctctgaaaaagtaatatgtgttgaaaagaaatatcactgttacatatagacaaataatagaaatatttgaggcatgcatttaaaatgtagaggccacttatagcaggcatattaacatgtgcatttgctttttaagaagtatacacacgtgtacctttagctttgaaagggtaagattcaatgcttgggtgatggatgcactaaagtctcagaagccaccactaaaggacttacccacgtaaccgaaaacaacctgtactccaaaatcaatgaaataaaataaaaaggtaagattcataaatagcaagttgagaatgcatgtttataccatgtagacaatgcatgataaattgttggcaataagacccatgtagctgactttggggatacaaagtagcttctgaaagaggttcctaattagccctgcctgaggtgactgcttaaggtatttatctgtagctggaatgcattgcctcagagacttgaggattcaggagctatgagtttcaaggccacagatgcagtggaatagtaaggcttcttcccctgcctggcacattgacctaactgatgagaggtgccttagggacccagcagctatggccatttatgtctagtccctcactctagaaaggaattgcttgaataccacggtgctggagtttgtagccacaatgctgaaggtcagggcagtccttcatgatgatgcatttctgtcagccatacttgcacatctctttaatgtctgcaatgtcattaagcagtggtgtatcatttttttttaatgcagaaactaaactgatactcaaaacctatgacaatttgaatccttcctgcctatccaaccttagtttttctgctcgataatataaattctccctttcagtcaggtagatagtcttcctgtcttcctgtcattcttggtttctctttgttgctcttgtcttccccacctgctgaaatgcttttcttctttctttcttttttttttttctgagaaaagacctcactctgttgcccatcctggagtgcagtggcataatgacaactcaatgcagtctcaagctcctgggtcaagtgatcatccttcctcagcctactgagtagctgggactacaggcatgtgccaccacatctggctaatttcttcatttttttgtagagactgggtcttgctatgctgcccaagctggtcttgaactcctgggctcaagtgatcttcccacttcagcctccaaaagtgcagggattacagacatgagccacccatgtacctggtttctctcttcttttctaactaatcaagtactttaagtcacaactcagggtgacaacctccacctccattgacttctccagagcatttcatttcctcttatcctttctctgcactttgttagaacttacattctgatttgtactgttgacctttgagcccttaagtttatgcaccttctctctctctctctctcgctcactctctctctctctgtctctgtgtctctctctgtttctgtctctctctttttctctgtcaattattttattctggtatttggtacttatgagaaatcttattagtatcctaaactctctcaaaacaggaaatgtgtattttccttctcatctaattcttaggaaacttcatataggaataaaaaatatgtagtagtggattgtctggtaaatgaataaaagagggatttgaggtcagtgggctgtttcaggacatgaccaaggaatgtggtaccagggcagcaacaagcttgctaaggggcgataaagtagtcattgtatataacagaggaatttgggctcaatgcagatttgccactaactctttggcagtatagaattcactagagaaatattagtaggttagttagtattcctaataaagaactgctaataccttatagagacataagccatgtttctcgtctttcgtttctgaaatgaaattttggccagggaaacattttgcatccctttttgatgtctacaaatgtggcatttgtcagatgtgagatagttaagtgtgtgtgtgtgtgtgtgtgtgtatatatatactttatatatgtatatatacatatcctatgtgtgtgggtatatatatatatatatatatatatatatatatatatgaatgatgcatggagagatatctctccatgcatccaaaatattcacaacttttcactaatatctgaataacatttgaaaaattgacaactcttctggctaaagatcagcatacacattcgttccacagagacttgtgccaaaatcttgctcagctcaaggggtactgcacaataaacaataagaaacttttataactccgactaatagaactcattgcttttccagtttgaagataaaggatgtctgcttgctttccatgcctaattttcctgatgctgtaaagctgttcaggaaagttcccactgcaggagttttgctagtaatcttcagctccgtgggaagcctttggactctgttgctatccctgaaagtggctgttcttctccatcagtttcctgggcaagggctcgaaccagctattagtgtctatttgcactgcatgaaaacaaaatttaatgtaaagacgcttatagcttgcctaccctaaaaccccaggagtctcattctgcctgaccctggacattttttgaactgatagagggatgggtatctggtgggtctcttcagtcagctcatctcagcatgttgaaagtccaaatgacccttgcctgaggatggtgaaagtaatttgtatgtgtgtatacataatcctgctttttcactatttccagtcacagattgcagagatagttgactgtgcttgttagtgtgagtgttaataactttgctatgctgatttttagacttcctatgctatatgatctccctgaagagcatgacagagcattgctttggaaaatcaatattcggcgtgattattccttctttcatgtgtaatcaaactttgaagaccaccaataggccaaatctacaagcattaggtttctaaacatattgtttagtcaggagaaattgtgttttctagctgaggtatgccagctactggtatggagaaaatctgcctagcaaattggaaggggccagaagctcaaatgctattgagaaccactcaacaattcttttttcttatacacaggattgaagcacagagcaaaaggaaaatccagctttgggatttgttcccttgaacttacaaatgattcattagaccaatgacattgtgagaatttggtctctgacaaagaaataaatgttttaaaaatagtgctaatacataggtacaaatacagaattatgtcaggcatgtatttttttaaagatagagtccagtgaaaagaatacgtgttagaatatggattaggtttctaaaggtatacttatgtctgccttcgtcttcagaaaacaaagttgtatgtacactttaagaaaggtcttagtgtggtaaacgtgaggcaaaccaaagtcctgttacttcttttgtcatatcattaaagcctccagacggaggtttcttcccattatgtgatgtgcagaatttcagatgtcagtcagcagctgaagtcaactgttggtccaccaggcctctaagctgcagcctctgtcagcttggggacagtgggatccatgtgacttgcctgctactgcccttgattgggcagatcacagagcagatggcctgtgtctagagtacaaggtgttaaggctttttttttggggggggaagaaataattcacatgtgctaatattcctggatgtttcactgataatataatatagaatgtatgaaaaaatcaaagtcaattagaaccagaaatctcctgatactggatgattctatacataaatatcttgcactaacagcaagaataataaaagttgtacaaaaaatgtctgttcttccccagaccatgagctccatggaggcagagaccttatttggttggtttactgcccttccccaatgtttctaccaagctgaacatgtatccagctctcagtgccccattgagttgaaataaattacagtgacataaactatgttcttcatcaaatgctggacaagcacgtttctcaggcaacttctctgggatcaacataagaacagggtgatgaaatgtgagaagcagtgagggcaaggacttgagcctggtgcctacctaaagtttacactccacaagtattccacccaacacttcagataccttctcttctttcaaagtcaacagtttatgcccattgaaaataaatacacacacccactcatgcccataggcatgtgtgtgctaccagaaaatatgtacatgttaggctctttggaagcagtggtagtttggtgagaattgctgcattggctcatcaacacagacctgatcgcactttgatttcatatcttgctatgcagggctcccattatctgcctgccatttgtgtgcatttatgtttagcgtcaatttctcctcccatgaggctataatctgccttgtaaggagctaaaatgggaaaagcagttagaatgatgagtccagttggagcctgctggggaacaagacagtcatcacaggccaatcggcagtggagacagggtggcccttatcacacagaggcatctggagactgagagagacaaagcaacacagctgcaagccgaccatgatctgctggaagcttcttcagtcataaagcaaaggacagtaattctgaatgacaatgtaggaaaacaaaaaagaagaagaaagaaagaaaatggttgagcccagacgatcatttttagttacggatgtcacaaatggtgattgctggtagtgaagtatctgaatctgaagaccagctgtatatagtatgtgtgtttatggaggtgtgtgtgtgtgtgtgtatgtgttggagaagacctgcatgcctagttgtagcactagccagaaattcttgtttcatcgtctagaatgtggccagaggtttgcctaaattctcataagtccattactgttcttctataaatcaggctgcctgttttgcataattcaccaggtaattcacctatcactaggcaaggcagctgccatggagtgcatgcaggaattcccttcattgactcaggctggtaccattctcagcatttttgctgtttatatatttttattttggtctcggttttcctttatctaaaaacgtcaagctgggatggatccttggagatgctcgcttaaacaagttcattacacttaaaatagttttacaagcacaagtgaaaataatgtaataattgcagcagattcttagacctccactggatcctgggttgcctgtttcctttactcagttctagtttctaagtttattgctgggttttgatgtatgtatgtgtgtgttaattttttaatatagaatatgaagtttgagggaaaactattgcccttattcttgtcgatttgttattcgatcttttcttttcctctttgttggtatgtgaggagttgcagagcaaagctgctgagatcttatatttgactgaggtttcacaagctctgcgagatatcctaatcttcagagtgacacctggtttagccaaccacgtggaaaaaactaagggtttagatataaccacattcaaccacagcctttaccttctcccctgtgctttgctgtatctaatgacggcccagaaaggtgcaaagagagacttttcagaaaaagcataaaaacaatcaagaaggaaaaaattgcttggttgttttctgagatacctgaaccagaagcaattgagtatttaggtgtaactttctatgacctattagaatgaatgccattcttatggcttaaatttttttcaagatgaagagggcacttatatagacaaagaatatatttcccataaagatatattagcacaattctaattaatcttaaatctaagtttttgttccccaagtccaatactcagtctagaacatatgcccttttctgtgatgcctgctggccaccatgtatgatcatggtatattgtgcattgtacaaagtgcccagccaagggctgaaatcaactagtgctctacttatgaggaattaatccaggcatggcgctgtgtctaccccagaggatgtgccttttctaattttcgtaaagttactgcaatgggccagccctgaagatatacagataacagaatcctatgacttttagatgacattagccatcatgagagcctgcctctctgtaaatggtgttagggtgtttattatcagcagcattgggaatacagttgttttgatgtgttttctgatgccctgttctaaaattcactacttctctgcaggctttggaaagtgggagtgtaaccactggtcctttgggttctttgtgaagttgtgctaaccataagatgccgcatactctcctagtgaccacagtttttatgggaggtgatgtacagcagcaaaagtctaatgtaaatctcatgttggttcttccagagcaggggcagctagagtctaataatttcttgggaagagtttctgtacctggaaattttagatgtatatcaaggacatgtgagcaaatgggaaatctaattgcccagtgcctctggagcaaagtgtagagacagaaccagaatgttttttaccggcacatttctgtattaaactaagggagggaagctctttaactatatgggaactttttctcattggttcctttaagtgtcttaaaaaaactgatgtcttcctaagagaacttgtgaaaggtggtaaaatgtttaattggaacttaagaataacttcctactgaatagctttgttgatttcactttcctgtggggaaaagatagacattgacaaaactgtttcgatgagaattaatcatagctgtagatttcaaggtatgttatgatactaggtttcatctcctggatcttcctcctctacattaaaatgattagaatgataaactcaaggcatattaatgatccctaatcaatgtaaaaaaattatcatttctcttctttatgctgtatttactgtcagaaatacagacatacatattaggaagatttttcttgaagggaattggcacaaaagggttgagacctttaattaatcaaaaaattgaccattccttgaaccttgattgtttggtatcattaacaaaggacatgagacaacatgttcaagctttataatttgctggaaataatattttctttttttttaaaaaaagcaattttttgttgtaattgttaatcttactatatatttgtctcctgaaaatggtgttatttgccactccttctacgtattaattggtgtaagctcttaagttatataggatagttttaatttctccaaaaagctgcctaaggaaagtaaaacaccataaagaaaagggtatgtacccaagaagtagcaagaaactaaagagaagagattgagatattatcatgagaatttaataagagaattaaatatctagaaaaatgtgtacatacttagaagtagtaaacattaatttcctttcttccatctatagttcacctctagatcactcttttctttctttagatcatcagtatccaagattggaaagagtaaatgagtgttgataaatgggcactctcttgttctgttgatataagcttaagttggggtagcttttctggaggactgcttgacaatatacgtcaaatttatattgtgatgtcctttggccatgcaatttacccttcctggaatgtacgctaagtagataattgaataagtgaaaaaccaaatgtcttcataaggatattcaccatagttttgttgaaaattatttacaaattggaaacaatctaaataaatgtcaatacaggaatagtttaattgcatatagaactgtacatacaatgtaatcctatgcagtcactaaaaatgaaaatgtataggtgtattgattgccctgggcaattaccataacgtataaatgaatgagtaaaagtatcacagaataatactcttccctcctaagtaaatcctcaccaataaatcctattatacaaggcaaaacctgtatattatccctatcccctaattttcatcatctctcatatctaatccaccatgatgtctttttcattcctaagtgtgtttcagatcatccacttccctctaactctatcactgtcttctggtccaagcttggtattcaattaatacttgttaaatggattctgaatatgattccattcataacagcacacctatccacgtacgtatgtgaagacacaggtgcctagagaggtgttcactgaactactaatggtggtttcctcttctgtggtagaattcagcattatctttatttttttatttgaatttctcttgttgtttgaaatatttttaaataataatgtgtaatttacccctctccaaaaataaaacttataaaatggggatgataactattattctacctttctcactggataaacatagtggtcaaataaacaaatactcgtgaaagtcttttataatgtgaaaacaaaggtttttttgttattatgtgcaataataataataataactatagatactaaaatttgttgaatatatttcctcagtattttgagtgtcttaactcatttaaatctcacaataagcctatgatactataaatatacccatttcaaatatgaggaaactgaagcagagacagacgaaataatttatccaggtagacacagccagtagagctgaggcaggatttgaccccacacaatcaggccctaggacccaagccctaaccactgtgccaaaatcataatacctgcaggaagtggcaaatgttgaacttagctccatatatcagactcttgccactgtgaagcccttacagataatttcttttcttttttgagacggagtctagctctgttgctcaggctggagtgcagtggcgcgatctcggctcactgcaagctctgcctcccagtttcacaccatactcctgcctcagcctccctagtagctgggactacagccgcccaccaccacgcccggctaattttttatactacctcagttaatttagaaagattttcaggcactgatgaatgattttgggagtaatcccaagccaaatgacctctgttggaagtaatttaatagatgtgtttaaatattagaggtgggtgagatggtgaagaattaacatttgaggaacatttggtatcctctgggcaatatgtagacaccctttcaataaatcctcacaacaccccagtaagttatgtgttatttgtttctattgtaagttgcagtcatagataaggaaactcagatatgtattaagtcatttgctcaggtctttacagctattaagttgcagagttgggagcccatctaaactcctaagatcagggtctggatcacctctattattttacattgggcatctatcatccaggacctatgtgctgcaggaacgtaattaagaatgactttgacaagataaatatttggggacatgaagcctgatcacagagtctaccagttatgtggacttgggcaagcaacaccatgaacctcacttttttcattctcaaagtgggactaatgaaatttttcctgcttctccaaaagataattttagtcactctgttggtgagttttgcaaaaacattgtagtataagccttcacaaggaattacagagaagaagataagtcttagcattcaagaagcctggactgtacctgtctcaaaattattttatgctaaatgcagacaattttctctatttggagtttctttcccatcttagttggcctcttctcagttttctgaatgaagcgtgcaccctcggatgtctggcctttactcctgcatgtcttccggtctggaataccttcccctccctcaggaacttaaccagcttcaacatgcagccttcctgaacactccaacatgaagggatgcccttctgttctaaatgtccactgcactgaacaaatcatttaatacaaatttctctgtagtttatacagaggatttgtgtttatgggcttatatgttttctttaaaaataagttataaagtttttgatgctagagcattcttttgtatccccaggagacactcagaatatatttgttgattgttttgattttaaagaaaaaggcggaagaatgaggtaaaatggccactatctgtcaggaacttcatataattatctctgcccagaaataaattaaaatagttttcttcagccagttgcaatagcttatagaaaaaaattaccttccctagatgtcagtgtcccaatttggaaaacagagtttggtcatatattttgtccgctgttgtacaacctttagaaacataaaattcaagaggaatactaaataaaaggatcaatcaatactgagttcagctttaaaattatttcatctaataatgctggttttcttggcagcactagcaagggctagaattttttaaaaatcatccttatatatgtattgattgaatttattaaaatgctttattaccatatccatttgcttataagaaggcaccctgatgtgtcctatatgagtttcaaaacacaattaaataaaaccatgcagagcaacaaacactacgtagcatttacaaactgcatttgtattcatttttatgtacatgaagggaaaaaaaacccaaaaggttgaaagccttctggagtgataaatgccacaatttagtggaaaatacacattgtaatttgagaacatctcccactaagagtcagtgtagctacagggacaagaagcctggtgctaaattgtctgaacattgatgtcccttcaaaattcatatgttggatcctagtacccagtgtgatataatcaagagataaggtctttggggaactgattaagtcatgaggggttctccatatgcatgaatgggttcatgctcttataaaagaggttgaagagagcaccctagggcctcttgcccttctgcttctgccatgtgagggcgtagcaagaggcactctttatgaagcagagtgagcccttgccagacactgaatgtgctggcgccttaatcttggacgttccagcctccagactgtgataattaaatttattttatttctaaatgactcagtctaagaagttttgttatagcagcccaaacagactaagacccctggcccacaggctcctgagcatctcagtgcctttgaggctataaaggacctcgaccttcactttcagcacatgttcaagtaaaagagaaaaatgtgtgtaaagaagtgcccatacccaataaacatacccatatttattgcaaattatcctctaaactgtttcattgtggtcaaaacccaagttataaatttttagtgtccttttaagagttcagtatttgtcaacctacggtcaacatttgcatcaacaaagaaggtaagatatgttgtgttatctttgtcatttttcagctgtcaactaggataggggccagaaatagcaaaactgtaaacttgaaattgtttcaggaagaagtgtaatagctaaggggtgtctatgaaatggaatgtatatcaatatgaggtaagacagctggtaaaaaataaaaaattagcaggaggggcaccggattcatgtaccagggaaaataatgtcatgttcattgcccagagagattcccaggaattagagattgagaaatattatttcttgacatgtctagaggctacgtggatagaagttctggaaaatgtttgagataaaggccaataaaaagcaaaaggacctgaggattctgtttattcactgaacagagaagctaaaaattgggctctcattttggacaaaaataaaagccatagtaataagtaaaataaaataacctaccaggtagcagagctcttagcaaaggattctgcaagcaaaaggcaggtgtgaattgggaaagtgagtctgggattgaggtgaggtggggttaggtgtagaacagggctatgaaggtcagggcagtggaaggtttgattctggaaagcatggcttcaagggaaaacttgagtggtgaacgggaaaatctgtgaggatcggaaatgtaagtctctatacttgctggggaaatgagcaagaaatgaaagggagagagccagatgacgcagctggaagcagaaatctgagcagggggaacctggcaacagagaggaggagctggaagaacaggggcagatcagatctagagccaagctgtattctctggccccatactttaatattctacctatgaggcgcagtgcctttgggtgttgttcataaaattccagtgttgaaaagggtttcagacattgtccgtgaagctcctctatccatcaagccctttgcaatatttacagtaaggaaagtgggagcgcttcagaaagagagagagagaaaaatgaaaattcctagccccatctagacatgccttatcagtgagttaggcgaagtgcacaaaatttaaaagtaagattctagttgtttgtattttagctattcacgttgcatcacaagagctccacaactggatttaaataattgtttctgccttagcaatcttaagtgtgcatgtattgttcagctattcctttaggggaaagattgctagatgggaataaaatggaaatgctgttttctaaaagttgtggtcttcatagggagatagctcttcacttcgtgtgttagtgatgaacatttgcaagctgtagagctgtagagaacactttgtggttcttctatttgaagaaaccctgatggctttgtcacatattccaagtttaacttttatttttaaagagtttatacatcatatttgaaaaagactcaaacatgtctagagttatatgttagacactaaacatacttgaaaaagatttaaaaccttggttttagtcatctgtaagtactctattttaaggacaactaattaatacttataactcagataattcaggagacgatcaatgattatgaaataacttcctatgacatacttttaaatagtaaatgccttcactgcatgtaattcacacatcaatatatactaaactatttccattaatatagccagtctccaatttacaggaagacattatgtttcacaagttgattttaagtgaattttttgtaatatagaaagaattgtcccaaagagtgactgctgaactggttaaatccacaaaaaaaagcatcacatgaattcatctactaggcaaatttgctcatccactttcaagtcaaaaaaaagttttaaattagataaaaacctgtgtatcccctttcttagtaaatttgcctgctgtgataaatatacacgtgcacacaaaaataggcatgcatttttaagaggagtagaaacccatttgaacttgtccaggaactcaagtttagaggctcaaatgtagagaatactaataaccacctataataattcttttggagaaggcatactgtattatgcctagtgcttaataggacaggggatttttcatctctcatgtgcctgggaatgagagccaggggcttcccccaattctaaaaaaattagcaattcagcagaatctacagtggggccaaattgtggctgggatttgggggatttcatcaaagtgggtcagaggtagaggtggaagagaagcagaaggccggtgggagtaggatacagtacaggggcgagcttccagctggctccatcagttgaggaagaagaagcaatcccaggaggtccatactcttgatattttatccctcctctcactaaggacagctatgccctttgtgatctgccctagactgactttttaatacagagaatgaaggccagtacagaaagcaaggagagaaagaagagaaatagatgctaagttgtccccttgaggaagaatgagggaaaatggagttcctgccaccctagtctattagctgacattgttactcctaattcaaggtaattattggtatgcaaagaaagtatgtattaactatatgtcaaccagtaactccctgaaatccacttgatgatagaaaattagtctatggccatatcactgtgaatgcaccaaatctcatctgatagcaaaatattgcatacatttcttctagaaactaagaattccaatgaaaagctatgaaagaatcctacttaggtctgaatttccatacattcctggtatctcagagggtggcaaggttagaaaacttgagaatctgtgggcacactagggatgaagtgatagtattctttgttggatatcaaaagaaatctaagcaggagaaccaaaatccattggtggaaccaaaaaaccattggtggtctgaaaagttaggtgggagaattgaatagcttagttctagggatcaagtaaccaccctgactattgagcttcccgataagacaacatgatggaaactacatggtttcatccaggtgctgggaacaagtcctactgaacattggcttttggacaaataacaggcagattctttggtgaagctttgttcatctgaaactcttccctgtcctctcttctccacttcatttttctgatgaggagaatggaagtttgtataaactagagtgctcaagcagcaggcagtggaagaggcaagacctccaagtagatctgcaagctctgaaccaagtgacctatctctaggccatattgaggaaggccaatgcagttttgcgatctctctacctcttcatttttccttttcctcctccccttccccttttgctctccccctcttcctctcaagagagtaatgtgctagtagtacctgatggtaccccagtgcttcctgccttcctcccttccacttcctgccttcctttctcccacttcctgccttcctcccttccacttcctgccttccccagtcccacttcctctcttccttcctggcaccccccagcactcccttccctccttctgttctccagtaccttcctttcttttcctttgcccttctctcttcctccttctctctttattttccttccttccttcctctgcaaggccttcttactagtttccacccattttcctatgtaaagcgattttgaattctagccatctgttaatacaaggcagtgaaaaatgttgaagtcacatcaaattccacttgctctgccagttaaaaatacagatgcttcctgttttatgctttcctctcactttctctagagtttaaacatgaaaatatgttccatgataaaaaccagcacatattccctttcatcaggaaacatattccaaacaatgaaaggaaggggagggggattattttcacaagtccagcaaggatacttggatgttgggggaatcatttgtagaaccataatttcacagagcaagaacataattattcacaactatcacattttatagatgaagaaactgagatcgcagggaattgttataattgttctcatatgtgctgcatatcgacttgccaaaattcacatcagcttaaattttcacccaacatgcctggtcctcaattgttccacaatactttttgctatccgctgatttcagaaagggttcttttggctactgggagaggccaaatcactaagcaatggataattaacctgaaactcagtaaatgcactggagtgaaaaaaaaatgtgagactaagagtcaagacacctgggttctagtcacaaatctgttactaactacccatcccaactcatagcaaaaatttttattaatactcttgctccacaaagagactagatcaaatggtctctaaatttactttcaactctttgaatcttgagttttcttccttcaattttctgctgactcagagcgtatagccttggccaagttatttactgccataaatctcattttttttccaagatgaaagggagaataacacattcccctattttcccagcatatatatatatacactatataatcttgcattaaattgactatctttagaaatcacattaaatcctttctatctatagactttggattagtcactaaagctagaataagacatgggccatatcattaggcaatgtctctggctgtagttgtattatcaaacactgcattgacgcttgttcatccttgcttccatcatacctttttatgtaagctgttctaattcttacatgactataacatggagcactgtatgtcaccatatctcttcctctcattgaatctgatcgtattctaatatctcctatctcaatgcctagttcttcacccattttaccaatgcaatatagaaactttcttactgcctttttatttcttacttttcttttgaataattcaccaagttattattgattttgtctgcctgatgtctttcaaatttatccacttttctctcttccatgatatcctaatctaagctaccatcacccctcaactgaactacagcagtcaaaagggttatttccacacagcagtcaaaaggattgtttcaggtgctaaatttggcaatgtcaccccactgaatggctttcttctggtcttaaagacccgattccagaacaaaacttacatggtaggcagctcctggcccttgactgtgtttctagtgtcatagtacatgctcctgaccttttgccctctttgagttcctcctcctcactatcctttcctggagattcaggtttggcagttccccggggttagaatgctcctccatgatttacctagttgctgcttattcttctggttttgtactgatggtcatgttctcagagcagccttctcagcctccctgggtcagttccctccatcatgcaccatcattgtgccttgtatccttgctgttattatacttatcagagtcgtaattttacatttgctcatgtcatactttttagattatgctttgctttcttctccttcaccagagtgtaaactctatgatactatgtctatttttatgtcaccattgtaattccagtgcctggcataatatctaatgcatagaaggtgcaggctaaaattctattgaataaataatgaatgaaaagaaagaatagaagtgcctgagttcaggccctgtatccccattccctcatatatgtggttggaaccatagaaggcaaaatttggtgttaaaagaataaagctggcaagcactgatgtgcctaacaggataggaagttcagaattcttttttaaaagtgttcaagggcccaggagtgcctggctaacataatgagacccagtctctacaaacatttaaaaattacacaggcatggtggcatgggcctgtattctccgctactctggaggctgaggtgagaggactgcatgagcctaggaggctgaaggcttcagtgagctgtgatcacaccactgtagtccagcctggtcaacagagtgagaccctatctcttaaaaaaagttctaggatattggagttgataatgtttgtaaagatcaacgctaacattgcctccaaccaagtctcaatatgctccaaaaagaaatacttcaaattaaaactcgtgtgtgtgtgtgtgtgtgtgtgtgtgtgtgtgtgtgtgtgtaaggagaggtggctcatacctgtaatcccagcactttgggaagccaaggcgggcggatcacttgaagtcaggagttcaagaccagctggccaacatggtgaagctccgtctctactaaaaatacaaaaattagcgtgctggcatgcacctgtagtcccagctactcgggaggctgaggcatgagaatcacttgaacctgggaggcagaggttgcagtgagctgagatggtgccaccgcacttcagaaacagagtgagactctgtctcaaaaaaaaaaaaaaaaaaaaaggccgggcatggcggctcacgcctgtaatcgcagtattttgggaggccgaggcgggcggatcacaatgtcaggagtcccagaccagcctggccaacatggtgaaaccctgtctctactaaaaatacaaaattagccgggcgtggtggtacatgcctgtaatcgcagctactcggtaggctgaggcaggagaatcgcttgaacctggaaggtggaggttgcagtaagcagagattgtgccattgcataatggagtgaaactccatctcaaaatatatatatttttatatatttttaaatatatgtttataaatatataaatatttttatatacatatctatatatagagagaataaatatgtatccacagagagagggagagagataccaagacaaacttataattgctataaattcaaataagagagaagtcagtaaaacctagagtaactaggaaatactccctagaggccaaatttgacctgtgctttgaaaggtaattacaattgggacaggaaacggcacggcttctttctcaaagattgattattctgactattctccattagctcttccttatacactttccactttcccaaactctgtcccgggatgctgacatgaaccacgtcaacaggactccctcacatcctgtcttcaagtagcatttgcccagagagaggcctcaggcaggaggttgtaggatggaaggagagatttgcaggcattcatttccctgctccctccctgcctggctgcagtgggtagtagctaattcctcttctgaaggccacagctcctggtggatgcccccttctcacttacaactgagcttctcagtgggttaccccttcacaactagggttggtcatggctttctgatgctgtgatcacccagggtacttttaaactctctacttatccgtctggggtgccatgtgttatttgctaagaatgaggtaataggaattttttaaaaaaagattaaaataatactatcagcctgtcaatggggattcctcccacccccaaaaatagagttgttcgtttctctttgtttggtttacatgatatatatatatatatatatatatcatgtatatgtatatgatttacctcaaaacagatcacaaagctgaggtcacttgaaactgactattacaagctagctggtagaattaaacttgtttccctaagtaaaatagaaaaatttggccaagagataagaaaatagctgcccctcaccaccacaaacacatacatacacactatactgaatggatcttcatagagagtaagttaataagaggccagcccctacctctgcttccctccccagggacatacatataaatagttcagttatgtctgacttaatagatttgggaaggaggaaacgtgagaggctagtccttctgaagggttgggaggtaagggtgagggaagggaggggagcaaaattacggtactgggatttggacccagataaaagctgctttgtcacatcatcccgatgtaaaatccgtgcatctgagagatagcccctgagccaccacacaggctcctcccaccagagtctgtctggcaggggtcagtgctgcctcgctgtggattagagggagtcatcgacatgtcatctgccatcaaccacacttattgtgaggaaaagaatgccccatacacatagaggccacccttgggatggacttttgagttgactaaagagtaaaaatcacaatggatcatccactagtcagcattattacctttactaacaaaaccagtagcttagccacgatcgtataaaacaataaatgttggttaatttctaaagtacattgattgttttagtttttgttttaagaaaaaggcttggccgggcgcggtggctcacgcctgtaatcccagcactttgggaggccgaggcgggtggatcatgaggtcaggagatcgagaccatcctggctaacaaggtgaaaccccgtctctactaaaaatacaaaaaattagccgggcgcggtggcgggcgcctgtagtcccagctactctggaggctgaggcaggagaatggcgtgaacccaggaagcggtgcttgcagtgagccgagattgcgccactgcagtccgcagtccggcctgggcgacagagcgagactccgtctcaaaaaaaaaaaaaaaaaagaaaaaggctttatgtggctgttgggaataggattatttcctctaacatttatcccagtatttttaaaataaagaaacatttggtcgatgaaaagtatagaatatttgtggtaattataataagtgaatacattacataatgtcctttgtgaaaaaggcttacattattataatgggaaggaggtaaattaatctgagtagtattagtataatagtcttagtaattataatggaatgaatcaccctatattataattatgattcaaataatatatatttttagagatcaaccgtttcatgatgtgctggaatgggatgtggtaataggagagcagtgattttggctaacacattaggtattctgagtcaatttggcacaacagcagaaattattttctctattgtcttattgagaagaaacgtcctaagaaggatcttggggaaaataaataagtatgtgagtctgacataggaagagagggtttcttcccctgcaaggcaccttgtgaaagcctagtggggagaaatagtgggatgatgaaggatggggcaggttacttctggaagcaaaattcagatcccgagtgcaggtgttgttcaggcctctgtgccccactgtaagtgtgctggcttcattgaaagggatgagaataaggcagacacgttcaaatatgcagagtgagggaaaatacaaagagcatatttgatattggttgaatgattgagaatatttgatatttgatattgattgataattgatgagcacttactgtgtgactaggaactgaactaaatgctgccccagagatcattcttatttatgctcacaccactcatgaagcaaaccattgttgttattttcattcttcagatgaggaaactgacagtcagtgatgctaagaaacttgctcaaggtcactacagtagttattgtgggcctggggtttgaattcagcctaactccagagtctatgaccttaaccattaagtgaaataagtgaacatcttcatgttcaggacatgtgatgtgtgtgcacacgcatgtgtgtgtgtacaaaataaaatatttgaagccaacaggatcctaagtctgggtgggtcctaatgccagagtgcttagggacacttcctttttaagcaagatagtttgacattgtcagcttttaattgtaatttaatttcttgtgtgaacattattaaaatgtattaaaaccagatcaaaacatccaagacttttatccccctgatttttatagaagccctctgcttacaagcacttaaagagagatgaatccttatttttcctctggtaagtgatttctaaattcccgtagaaaagcctttaaaaagaaaactcaactagctgcatttatggacttgaatacctacactctactaaaattattgccttttcttaatgatgttcctgactcatcctgaaaattgatcatatatgtataaggtgatgctcactttacaggtggagaatgttgtagccacaagtaatgaagactaatatatagatatttaaatccacattttgtccagaattctcaagcagggagttctaacctagccccacccctcattccctcattaagcattgttttcttagaaaggattaaaactggtaatatatctgtaatcaattagctgacatgacttaaaattgataagtcatttgatgaattctcatctcaaattccgaatgaataaacaatgagaaatgggaaagcctttggcagagagagactcattgaatcagttaattaaggaaagagaaagagccagagtacaagctatcaatatcacctacatgggtcaagaactcatccttatgtgtgtaataatagagctactcataaacctgaaatgatacaattaattacggaagttatagaatattggagcatcctcgggtgaaaaataattgtgtctatattataaaagtatgcaacataacacattttatctgcatttaacattttgttggtgtttcatgcaaatgaaaaaaaaaaaacactgtttttatgatttagccaaaccatgctaactctagtaacaaccctcccaatctcagtgttttaatgcaacaaacagttgtatcttgttggtataaattccactgcattgttcttggttgggttgttccttaaagaggatactcaggaatccattctcttcctatactgttccagaggaagatggctcctccattttcaatacgtggcttcaaggtcacgctgacgttgttcagacagtgttctgttggaagagtgagagaaaaaagcatgtacatacaattccttccaacacacatacacttaactgctttggtttgaaagtgacataaaccttctgctcacattccattggccagaattcctcacacagtccccacctggcttagtgctcaggaagaggaaatagatttgatgatcatctaggcaatgtctgtgatgagattggttcaaaaaatgtaccagtaaaaataaaaataatcctgttcattacattccagaaaatgaactgattaaagacaaatatgtatgcatcacttttctctttacgtagtgaagcaatgtgaaaaacatattaattgagctattcatggcaagacttctctttataaacttcatacatctgtcactaaattgatatgaaagaaatatttgatctcagaaagaattttatctatcatgatggaatgctggcagccaaatgtatacctaaaaattgctgaaatattggagtaaaaaggaatagttagatcgatcatcttaattttgtgaaagcatgcgtacatttttcaccttggattcagttgtgttggcattttataggcacagttataaatttgcctaaaatacagaatggcattacaacaaaactcagactcatggtgtaatcattgtttttttcaaactaaaaacaaagaatgaaaaataaaaacctctaagaacaaaattactccatttaattaaattaaacagacaaaacttggaggcatagtagagatggcaaggaaaggcctcagaccccttacccccatccaggggaaatatttgccagccactcctatcttcagcaaaacttgagttatgatgtaaactcaagactcttaaatttgtgattaatcctgggtgtcttgaaaattggagagtgggttagcaaattcatagttccccaaatttgtgctatctactgctgttttcttgtggattataagcttgaaggaaatgtgctgcctagagatatgagctgtgtgtaattactcccacctgctgggtaaaatctttattacatgggcattagacttcattcccatcgaggggtgaggaggggtgcaatatgaaccaaccacaccacaaggcttgtgaacatccttcctctatggtgtctcctgacacttctttccagcttccaaatgtgatacaactttgactggaaactgtgaaccaatgtgtatccaatgaaccaagggagatttagctccttaaaagaaaattaaatgtagaaagatgtggaaggatcaatgaatcatatttatccaataagtggttcaacaattacaagagcgagacaggaagggaacccttccaggcagagtggtcctcagctctggttttccagcctagagacccatgtggcaggaacttggccttcatcattgaataccctgcatacacccttcctcaagcctcctttgtatgtgtgagagcactgacttcagaaacagaaatgagtttccagccctcaagggaactgtttgctaaagattggcaggagcccacaagactacgacacagtctttgatgagctggctctccaagtgtgggcagacttttgtttctaagttattgggaggctttctgtgggtataaaacctgcaaaaaacacaagcatcaatgttgccatattaataactgctttcatccttggcaagaagaaaaagaacgtggggaaaagagtcaggcgcaaacatggtttgagttttattgtcttttacttgctcactgcctacacctcccaccagtagctttggaaagagagtttcagaaatgttatcttatgttttttatccctaagaatggggtcatagtcttcaatttatgcctaaagtgtttaactactccttcttaatttactcgctctgcccaggaagaaaacagacataacttgcaaaggtggaaacactggtacgttaggaatatcattcattttcggattcttggcccttgagtttcactgttacttaattgacaaagctgagctgtttcatttcacgctaggaagtctttggttaaattgcaggcttgggtttctgtcctttggcagtggaagtaaagagaaatcagaagcaatgtagcatttatgaaccactggctcctctaactgcctctgtggcttcaaatcctgatgatgtcaattgtggtttgtgtatatgtacgtgtgtgaatgtgtacacacatgtgagtgcgtgaacattcgattcatttctcatttttgttctctctcttttcccctcacctccggaccttttcatccttctttatgttctgttgccttcatctcttagtttttctattctatgccccttttgtttctactcttttcatctgacctattattatgtcatcagctataagcaccatggaaaacactagtttcatcatctccatctgaaagaaaaaaaaaaactcaacaagggagaagctgaatatatctgtcttcagtatctatctttgaatttggaatgcttcctgccaagaaaattatattctgaaactccttagatcttgcagtcttcatgaagcacaccagccaatagctgcctcctgacatcagctcagatatctggttgacttttgctgctagctcttccagccaatgaaagtagataccttaggccagtgttcccagacatttaggttttatgggataataaaatctccaggagcaaaatgaagaggctgatatattgccttctctttaaattttaacacttttgaaaaactgccatctacacactaccgctttttacattttaacacttttttaaaactaccatccattgtcatcattattccataaaaagaggtattttaggaaggatactcacaacataagttggataaatttagcaattaaaaaagcactgctttacttttatcttctcctttaatcaaagatgggatatgaatatcaaccagcattgatccaattttaggcccttagttccaataaaattgttccttttcccatataaatggttatgcctttgggccaattgctctgtctctcagaggttattatatcctgttgcctctatattgaggattgctgtttcatctttggagttacaatgtcccaaagggatcactgatacattcttagctccagtatataaatagaggcactaagaaataaaatgagagggttttgacacctctccctctcccccaccccccaacacacacaaacaagtaaatgggttagcttttatttctacaattgcacagcatatttagtgagagagggaagttggaggtgggtatcacacatgtaagatattgcccttattttttttttttttcagagacagtatctcattctgttgcacaggctgaagtgcagtgcctcgaacatagttcactgcagccttgaactcctgggctcaaacaatcttcctacctcagccttctgagtaactgggactacaggcatatggccaccatgcccagataactttttaaaaacatttttgtagagatagagtctcactatgtttaccaggctggtgtcaaactgctggcctttagtgatcctcccattttgccctcccaaagtgctgggattacaggtatgagccactgcacctgtcctggcccttattattgagtagattgtagtctaatgaaaacatatgagtataataaacaaaagaaaaaagaaaacatatttagccaattcatagcaaaaggcagacagaagtagatgctgaatagagaaacaagactgttagagggcagagaaaggagtaattcattttgctggaagaatcaaggaagcaatcacaaaggtttaatgtgtaattctgaatttatgtgattgctatataatcattctgtttcatggctgcagtgtaagctgtgtgagggcattgtttgtatcagatgtctgaacctctttatctcatcccttatcatagtgtctggtatctagtctataacccataatatctcctgaataactgaatgggtgcctacaatgataagtggtgtgaaagataccaagaaaatcaagtatcattcattgccccgaaagcacctgtgagcacataggtttgcaaacatgccacatgtgttcggtcagcccattgcttgtgtacatgatcatagatggtcatagggatttacttcattctgaaatggaataatttcatcctcaccctgctttaccttaggtaaagattttgatgccatttttattaagacatttacttggaagtaaatgtcatgctgtgaagagccattatagacaaatattgtagccacttgccaagtaatgacttatgctgggaagttgcttaaaaggctgattttattcattttatttgctatacccttgtgctacttagagaagggtagagaatgagagaggagcaatatgttttgttctcttttttttcataaatcagtaattatttgcagagtgttttgtgtaaagtgctcagctcacaactggaaatagaatcctgggttagacagtggccatagtgatatttacatatctccagcttgtagtttgccaattgaaatgcagacatatgcggaaattgcctcattgtcattccttgtttttgtaatattatccttggctctacggattcattttttttctccttctactgtcaacactgttttagcagtgagttatattatccggtgacatcagagaagcaaagctacatgtgtcagcttggcaggaattgtccacttacagcaaatttgtgacaagttgtatttttctaccattttcacctggagtgacgaagaatctacagttgagggagacaacatggacctcccctgatggtaacagtgctatgtccaattgagctgctgttgcttcagtaccaaagaggaaggagctggtgatctttgaataatccttcccctatgaaaagtaggaatgtatccccagagttcattgtctgtatctgtaggtaatggaggcttaactggcattaaaatcatagccagtttcagacccattaagtttaatggtttttgtaatgataggctgcaactgatggaataaccaaaagaacaattcatggactgtttatggaagaataccttcaccattcaaaatggacattaaactatggctggtttcattgcaaggcaaaagttccctctttatcttctagttaggtccatgtgcagcccaggaggtatgtaaaagctatactttaggagaaaagttgacttgaagcttttaagctaatgagtttgaacttggcatgttttctattatcattgtctttaatcagtggtgttatataataaggagctaataaattaatctaagtgtaagtcaaattaatataagttaaagtcaaaatccagctaggcaaagccagataggcatattaaaatggcagcccctaccccaattccttgataatccattaaaagtagaaagttttggttaggaagccacctcctgttacgtaaatcagaatgtaagagccatgagattagggattttcatttgttttatccacttttatatcctcagtgtctagaaaaatgcttagcatattgcaggcactctgcaaatattgaacatacggggttgatgaacatataacccattttggttgatgtagttttatttcttaagaggtaaaaattctttcagaaaaagaaaagtaatcatttctacaaaataaccctccactggttgatattcttcccagatctacctttcttcacacagatctttttttaagagaaaaccacagggatatgtggctggtgcaatcaatgataggtttgggatatgataaaatgtaggaaatggctaaatgggagagtacatgatttataaaatagaatttaaaataacagccctcaacagcagatctttgccagcagcacatgatgggaaaatataaaccccattctggggatggcatctggtacagattgagaaataaattgggcagcgaaacagaatgtgtcttcagtggtccttaagatcaaaccaccaatgataagcatggatcattggagcctccaccttgctctttttgaaacagctaaaatcagcaagggaatgaaaaggaaatggctttatcatctgtgagcagcttgcccctccctctggagatccaaatctccaaacatgcattttgatatactttgggagttctctttatctagtaatttcatttaggggaaaaaaatatagctctccctgcccacatcccacattgttacatcactgattcctcaccatgctaacacattcaataatctgacgtgcaactcaactagaagagcaatcacagccagtgatgggccggcatcatggagagtaaagacaaatggaaacaataataactgtggaagaagcagatctcaaatgggaaactcaatcccagtgatcagggaaaactccaaaggaaggatatgagttcaaaaaaatcaattcaacaaaaacttattgtctgtctaccatgtatcaggcatggggatatattactggtcaacacaatgtgctttgctgcctggtgcctgtgttctgatatctggtgtgcatgttctcaatggtattgcaagttgcattgggctagaatcatgaagtattatcaggggatttacttgaaattaaattagtcccattcttgtggaaatctggagctggcatatgcatggaagtgaaggtcttgttgctggttgaatttagtgccctctgcaatgaaagccaaatcccaactttagtctgtgactggggggccttctacaaagagaatgaattttaacaattaaccaacaatctaaattcttggaaagtgaaagtttctaaaacataaaatccatgaagacagaattagaaaatcaatgtgtcctttttggaggaagaggaaagccgctggctgaccacgtcactttcatgtttctactcaaatcttatcaacaaggcctttgttgaccattcatccccttcctaggcccccttatttctatgtctgtcttgtatcatctgacacattgtaaatgtccttatttatttgcttactgtctgtctcttcactctgaaatataaattccatcatgtcagggactttttcttcatcttccccaaatgatgtttgaagcctcccatctaatgctgagaggtatttccctagtagccctgtcatcactttcctaccactgtccctgttgccacataatttaagattccctgtggccaatgctgatgtcattatcatggacgtccttaggaaacgaaaataatttaagcttctaaaatgggcaaattcgatgtagagttgatgggtacatcacacacccatctagaaaagagcatctcaggttggtacctgaaacttggtagactccaccccaagtcacatggccaactgatgtgttacttcttagacatcctgctttctctgtccataggcctggttgggtggtctttttcagatactaaatcatggtacaattggttttcataaaactagtactctaattctacttttccagtagccttgagtaaaggaatgttgaaaacttgtagtgatgaaacgtgtaggatttgcgatttgtcggagtagggacaaaactatttgagaacatagtccagctgaccaaaagaaaataagttctcatattactaataacttttagggatccaataggctcaagaattctgaggttgggtttgacagtgattagtgtaaattaagtagaagtagttaagaaagtggctgaaattgaaggatcggttgtggttagtaaatatggaggattgaaacacaatgcaaacttgataattgataaccttcatttaattctaactaaaagcccactttctggtccaaagttggaactaagaatgaattctttttactctgagaggatatttacaaagaaaacacaaacacacaaactatgggtaacacaaaagcaaactagaatgatttatcttattattctgttatgggttgaattatttcctcaaaaaatatatgcttgtcttaaccccagtgctgctgaatgtgactttatttggaaatagagtctttggaggggaattagtaaagatgaggttatactcaagtaaagtaggtccttaatccaatacaactggtgttcttattgaaagagaaaagacaacgtaaagacatagacacacaggaagaacaccatgtgaagacaggcagtggtcagaattatgtatctacaagccaaggaatgcctgaggttaccagaagctggaagaggcaaggatcccctccagagcccttagaggaagcagggccctgacaacactgtgatttcagacttctctcctctagaaccattagacaataattttctgttgtttgaagccaccaaatctgtgatactctgttacacaaatcctaggaatttgatacaccttcctagacccaagtggggaagaaaagggagaaacaggtttagaggtggagtaaaagataacagcttctcacaacttgaggcaagatgcgtatgctgatggcagagaaaggagttggcattttctgaaagcctgtcagatcccctgctttgtctgggaaggggaggaatatccacagcgtcttagcaggtgaaatgcagcagcgaagaccaggtgcctgtattgttgcctctggttgtgcagatgaagagtcattaggctgacctcatctatggacccaactggaattagccctgactctagagccactggatgttcaggcaaaactgaccctaaaattctttttaaatgcattgcttaagccaagcattctcttattcaaaatcaagctgctgcattttcatgtagcatgaaatgcaattttctatttaaggtgttcaactaacttagggataggttgatggccaaacaaagaaggtttcattaagatggaaatgatttggagtatctagtctccaaagtgattgctctagagacatttatcaatccaccggtggcttctagtcgatatttggttttataggttggggcaaaagtaattgcagtttttgactttttaattgcaaaaccgcagctacttttacaccaacctgataatattccccagatccttccctgcttcctctcattagtaaccagagcaggctgagaatcacttacctgtctcttgtgttccacaatgcacactttgaccccatctagtctcttccaatatcatttactcttgtccattagcggattttctttacttcctgtgtgtctagcttgttggggggatagggaggagaggagaggctgaggatattttttctgtgtgtgtgtaaaggttattcaaattctttatcacttgcttttgctttttaggaagaaaaaaacatgaatatcttataacactattttttaaatgaaattgttcagcaaattatacttaattatatttttaattttaagttctgggatacatgtgcagaacatgcaggtttgttacattggtatatgtgtgccatggttgtttgctgcacctatcaacccgtcatctaggttttaagacctgcatgagagggtggagccaagatggccgaataggaagagctccagtctagagctcccagcatgagcgacgcagaagacaggtgatttctgcatttccaactgaggtactgggcttatctcactggggaatgttggaaagtgggtgcaggacagtgggtgcagcgcacccagcatgagccaaagcagggagaggcattgcctcacctgggaagtgcaaagcgtcagggaattcccttttctagtcaaagaaaggggtgacagacggcacctggaaaatcgggtcactcccaccctaatactgcacttttccaaaggtcttagcaaacggcacaccaggagattatatcccacgcatggcttggagggttgtatgcccacggagcctccctcattgctagcacagcagtttgagatcaaactgccaggcggcagtgaggctgggggagggacgcccgccattgccaaggcctgagtaggtaaacaaagcggccaggaagctcgaactgggtggagccaaccgcagctcaaggaggcctgtctgcctctgtagactccacctctgggggcagggaatagccaaacaaaaggcagcagaatcctctgcagacttaaatgtccctgtctgacagctttgaagagagtagtggttctcccagcatgcagctggagatctgagaacggacagactgcctcctcaagtgcgtccctgacccctgagtagcctaactgggaggcaccccccagtaggggcagactgacacctcccacagccaggtactcctctgagacaaaacttccagaggagcgatcaggcagtaacatttgctgctcaccagtatctgctgttctgcagcctccgctgctgatacccaggcaaacagggtctggagtgaacctccagcaaactccaacagacctgcagctgtgggtcctgactgttagaaggaaaactaacaaacagaaaggacatccacaccaaaaccccatttatacatcaccatcatcaaagaccaaaggtagataaaagcagaaagatgaggaaaaaacagagcagaaaaactggaaactctaaaaatcagaacgcctctcctcctccaaaggaatgcagctccttaccagcaatggaacaaagctggatggagtatgactttgatgagagaagaaggcttcagacaatcaaactactctgagctaaaggaggaagtttgaacccatggcaaagaagttaaaaaccttgaaaaaaattagatgaatggctaactagaataaccaatgcagagatgtccttaaaggacctgatggagctgaaaaccaaggcacgagaactacgtgatgaatgcacaagcctcagtagctgatttgatcaactggaagaaagggtatcagtgatggaagatgaaatgaatgaaatgaagcaagaagagaagtttagagaaaaaagaataaaaagaaatgaacaaagcctccaagaaatatgggactatgcgaaaagaccaaatctacatctgattggtgtaactgaaagtgatggggagaatggaaccaagttcgaaaacactctgcaggatattatccaggagaacttccacaatctagcaaggcagggaacattcaaattcaggaaatacagagaacgccacaaagatactcctcgagaagagcaactccaagacacataattgtcagattcaccaaagttgaaatgaaggaaaaaatgttaagggcagccagagagaaaggtcaggttacccacaaagggaagcccatcagactaacagctgatcctctcagcagaaactctacaagccagaagagagtgggggccaatattcaacattcttaaagaaaagaattttcaacccagaatttcatatccagccaaactaagcttcataagtgaaggagaaataaaatcctttacagacaagcaaatgctgagagattttgtcaccaccaggcctgccctaaaagagctcctgaaggaagcattaaacatggaaaggaacaaccagtaccagccactgcaaaaacatgccaaattgtaaagaccatcaaagctaggaagaaactgcatccactaacgagcaaaataaccagctaacatcataatgacaggatcaaattcacacataacaatattaaccttaaatgtaaatgggctaaatgctccaattaaaagacacagactggcagattggataaagagtcaagacccatcagtgtgctgtattcaggaaacccatctcacgtgcagagacacacataggctcaaaataaagggatggaggaagatctaccaaacaaatggaaaacaaaaaaaggcagggattacaattctagtctctgataaaacagactttaaaccaacaaagatcaaaagagacaaagaaggccattacataatggtaaagggatcaattcaacaagaagagctaactatcctaaatatatatgcacccaatacaggagcacccagattcataaagcaagtccttagagaccaggaagagacttagactcccacacaataataatgggagactttaacactccactgtcaacattagactgatcaacgagacagaaagttaacaaggatatgcaggcattgaactcagctctgcaccaagcagacctaatagacatctacaggactctccaccccaaatcaacagaatatacattcttctcagcaccacaccacacctattccaaaattgaccacatagttggaagtaaagcactcctcagcaaatgtaaaagaacagaaattataacaaactgtctctcagaccacagtgcaatcaaactagtactcaggattaagaaactcactcaaaaccgctcaactacaaggaaactgaacaacctgctcctgaatgactactgggtacataacaaaatgaaattaagatgttctttgaaaccaacgagaacaaagacacaacataccagaatctctgggacacattcaaagcagtgtgtagagggaaatttatagcactaaatgcccacaagagaaagcaggaaagatctaaaatggacaccctaacatcacaattaaaagaactagaaaagcaagagcaaacacattcaaaagctagcagaaggcaagaaataactaagatcagagcagaactgaaggaaatagagacacaaaaaacccttcaaaaaatcaatgaatccaggagctggttttctgaaaatatcaacaaaattgatagaccactagcaagactaataaagaagaaaagagaagaatcaaatagatgcaataaaaaatgataaagggtatatcaccaccgatcccacagaaatacaaactaccatcagagaatactataaacatctctacacaaataaactagaaaatctagaagaaatggatacattcctcgacacatacaccctcccaagactaaaccaggaagaagttgaatctctgaatagaccaataagaggctctgaaattgaggcaataattaatagcttaccaaccaaaaaaagtccaggaccagatcgattcacagccaaattctaccgaggtacaaggaggagctggtaccattccttctgaaactattccaatcaatagaaaaagaggaaatcctccctaactcattttatgaggccagcaccatcctgataccaaagcctggcagagacataacaaataaagagaattttagaccaatatccctgatgaacatcgatgcaaaaatcctcagtaaaatactagcaaactgaatccagcagcacatcaaaaagctgatccaccatgatcaagtgggcttcatccctgggatgccaggctggttcaacatacgaaaatcaataaatgtaatccagcatataaacagaaccaatgacaaaaaccatattactatctcaatagatgcagaaaaggcctttgacaaaattcaacaactcttcatgctaaaaactatcaataaattaggtattgatgggacatatgtcaaaataataagaactatctatgacaaacccatagccaatatcatactgaatgggcaaaaactggaagcattccctttgaaaactggcacaagacagggatgccctctctcaccactcctattcaacatagtgttggaagttttggccagggctatcaggcagaagaaggaaataaagggtattcaggtagtcaaagatgaagtcaaattgtccctgtttgcagatgacatgattgtatatctagaaaaccccattgtctcagcccaaaatctccttaagctgataggcaacttcagcaaagtctcaggatacaaaatcaatgtacaaaaatcacaagcattcttatccacccataacagacaaacagagagccaaatcatgagtgaactcccattcacaattgcttcaaagagaataaaatacctaggaatccaacttacaagggatgtgaaggacctcttcaaggagaattacaaaccactgctcaatgaaataaaagacgatacaaacaaatggaagaacattccatgcttatgggtagaaagaatcaatattatgaaaatggccatactgccaaaggtaatttatagattcaatgccatccccatcaagctaccaatgactttcttcacagaattggaaaaaactactttaaagttcatatggaaccaaaaaagagcctgcattgccaagtcaatcctaagccaaaagaacaaagctggaggcatcatgctacctgacttcaaactacaaggctacagtaaccaaaacagcatggtactgataccaaaacagagatatagaccaatggaacagaacagaggcctcagaaataatgctgcatatctacaaccatctgatctttgacaaacctgagaaaaacaagaaatggggaaaggattccctatttaataaatggtgctgggaaaactggctagccatatgtagaaagctgaaactggatcccttccttataccttatacaaaaattaattcaaggtgattaaagacttaaatgttagacctgaaaccataaaaaccctagaagaaaatctaggcaataccattcaggacataggcatggacaaggacttcatgtctaaaacaccaaaagcaatggcaacaaaagccaaaattgacaaatgcgatctaattaaactaaagagcttctgcacagcaaaagaaactaccatcagagtaaacaggcagcctacagaatgggagaaaatttttgcaatctattcatctgtcaaagggctaatatccagaatctacagtgaactcaaacaaatttacaagaaaaaaacaaacaaccccatcaaaaagtgggtgaaggatatgaacagacacttctcaaaagaagacatttatgcaaccaaaagacacatgaaaaaatgctcatcatcactggccatcagagaaatgcaaatcaaaaccacaatgagataccatctcacaccagttagaatggcaatcattaaaaagtcaggaaacaacaggtgctggagaggatgtggagaaataggaacacttttacactgttggtgggactgtaaactagttcaaccactgtggaagtcagtgtggcgattcctcagggatctagaactagaaataccatttgacccagccatcccattactgggtatattcccaaaggattataaatcatgctgctataaagacacatgcacacatatgtttattgtggcactattcacaatagcaaacacttgaaaacaagtgaaatgcccaacaatgatagactggattaagaaaatgtggcacatatacaccatggaatactatgcagccataaaaaatgatgagttcatgtcctttgtaaggacatggatgaagctggaaaccatcattctcagcaaactatcgcaaggacaaagaaccaaacaccacatgttctcactcataggtgggaattgaacaatgagaacacatggacacgggaaggggaacatcacacactggggcctgttgtggggtggtgggaggggggagggatagcattaggaggtatacctaatgttaaatgaggagttaatgggtgcagcacaccgacatggcacatgtatacatatgtaactaacctgcatgttgtgtacatgtaccctaaaacttaaattataataaaaaaattaaaatataaaagacctgcatgcattaggtgtttgtcctaatgctctgcctcccttttccccccatcccttgacaggccctgatgtgtaatgttcccctcgctgtgtccatgtgttctcattgttcaactcccacttatgagtgagaacatgcggtatttagttttctgttcctatgttagtttgctgcggatgattatacttaaatatttttaaacaaggctttagacctaaatccatcaaaataaaccactttgcatgaaaaaaaatcatgggaccatttcagcatgttctataggtgggctgatttaaatgatttccttatacatctctttctgcttgtgctattgaataattgagaagtttgcagggggtgtggtgccttgcacagaccgagaaggaagagaaaggaagcaacacttgcaaaaggactttgttgtgtacagtgatagaatgctctacctgtgttactcattgaatcaggaggattgttgaaggaggagggctctctggaattgtaatctgaagaatgagggttattcatcaggaaaagagggcaaggcaaggggagggggaagcataggagaagaaataaaaggcccagaattctgaaaaactccatgctaaaagacccagaattccgaaaaactccatgtcagcagggtcaaaataaattttgtggaatggttacttagattgagagaaggactaatgagaaatgaaactagaggtagagtcagagatcagttaatagtcttctattttaggttaaggaattcccatttcattctgaaggtcaaggacaacttaggtaaagggcagtgactaagaaagaccaccctggtcaggctcgatggctcacccctgtaatccaagcactttgggaggctgaggcaggcagatcacttgaggttagcagttagagaccagcctgaccaatatggtgaaaccctgtctctactaaaaatacaaaaattagctgggtgtggtggtgcaagcctgtaatcccagctgctctggaggctgaggcaggagaatcacttgaaccctggaggtggaggttgcagtgagccaagattgcatcattgcactgcagcctaggtgatagagtgagactctgtctcaaaaaaatagaaagatcattctggcttttgggtggagaatagactgtccatgggcaaagtcagagtccaggaggccatgccagaagctgctgctgtactttaggcaaattctatgtggtggtggcattggtagtaagagtggagaggaatatacaagttagcgatacatttaggaggtaggttcgataaaacttggtgatttattaagtttgaaagtgaagaagagggaggagtcaggattgacttacacatgaaacatataagacttctttctgtcctaaaaaaaaaaatcaccgttgtagaaaatgatagaaactgatggacataagaaagcaatcaggatctcgattctcaatgccatgtgaagaaccacatgctcttttgacattttaagtagagatgtacatttggtttctgcagatccatttcatagctcggctatgatttcagactcattactcaaaagcaagggtgtaggatcaggggagggtgaacaagttaggcagaggaatgagctgctctgtgaggtggtttgctccacagcctttcactccttcttcccaacgtctcacagtcataaaaaaaaaaaaaaaaaaaaaaaaaagtaggagggagtgcctatatccagtagaattggagacaagttagggacagagctcagagagctgctcctgatgcggaagtggcaagaaaagacgcttcacctccctgacaacaacacatccactgtgtgtagcaatacgtttctgcctaagacaatttacccccagggaaatacaagaagggagacatctcccaggaaattaccatttgtttctactactgaaggattttcgtctatttatttgagaaaagtgagaagcttctttttgctgagaacatagtaaatgctgcaaaagcatttgatgtcatgtccattaagtaacttggctgaatttcttgaagctttaggtaccttgcttcaattcctgcatactatttactgaccctctgtaacaggacttttcaactttcaactatattagaacatgtagtttctctattaccaagttccagctgaacagtctatctttaatattcagaaagtgtttggtgtctactagccaagactgtagtctgagcaatgacattgacagtggaccttgatcttccttcctttgaagcataagtgccttgtatcattttactttcctctagtagaagtccttcctatggttatagtatttagtttctactttttgcatttaatcggagcatctttgtaatttacaatttttaaatctttttttttcaaggactaaacacgaaggtttgaagtccaacaggcaactaaagatgtatacaaaccccgcacaaatcagcctccattctaatgccattcctcttctatacttccattttttaaacctgagcatatattttgttttgagtcttttcttactcttttatttgttaatactctttattcagtttttgtcaggtaaaaatgttttgccttgccaaagaaccatctaattccttctcaggtctttttaatatattgcttccagatatttttggattggtggtttctgcaattctccctaaaacaatcttcgtttctcttacacatctcattctctacgctttggcagacttttgcagatgcattctataactgcacaaattacccttccaattttctccagctaaacaatctaatccagggtcctaaatatttttggtgccatagactcctttggcattccagaggtgcccagggattttactcaggatagtgtctttaaatgcatgtttaaaatacatcagattacaaagaatgtcaattaaattgaaaaatagcttaaatattttaataattgtgatatagtaataaatgaacttctttaggtgcattaagtaacaagatctactaacagggctaataacttattatttcagtatgtctgtggtttctattggtgacaaaaatcacaagtactgttaatatttttgttttattttgtttaaaattatttaaattttaattaataaaacatatatatgtatatttatggtgtacagcacattgctatatgtatacattgtggcatggctgaatcaaagtaattaacatatgcattagctcacatagttattttttgtggtgagactgcttaaaattcactctcctagcaatttttgactgtgtgctgcattgtttttttaactatagttagcattttgtaaatagtcctcttagaattattcccccaattgaagttgtgtgccctttcaccaacatctctgcattttctccttccaccactctctgtcctgagtaaccaccattctattctctgcttctatgagttcaactttcttagattccacatgtaagtgagattatgtggtatttgtcttctgtgcttagcttctttcacttaatgtaatggtgctgttcatattactgtggttttggtgcctacattcaaactcagtggaaattctaatttgcagttagtttttcagaaagaagaaatgtgtgaatagtttcttatggtccaagcccttggatcctctgtattttatccacagatgcttgggaggatctctagatcccagattaagaactccagctagttattagtcctttgtgctttgaaactcaaatcaaatacccatctcttccatagaactttttctaaattcactagactcacttatctacccttcttcctatagtttcattcactctctgttatgaaatatccatttattatcactattagtttttctgtattgctctcttctttgtaaatatctctatactttattctcttttatttcctttgtatccaggacagtgtctggcatatgcaggcacacaataaatacttgtttaataagtgaattaaaactctagacagcttctggtaagtttttccaggttaccagtaatacaaagacctgaatgttatttattcacttctacaaggggcacagtgtccaagtcctgacctttaataagagatgtgcttccagcagtgtcttcttggcatagtcttaaccttttattctgccctggtgcacacttaatctctcatgaagtcacagctattgatttataactgaatcttcaagatattttaatactttataaacatacaaacaacaattaattgcattgttagataaaaatgtattacagagatcaccagcacaaaaataagtatttctatttataactgaaaaaaaaactggcaatggaatattagttgtttacaaggcaagtattctgaataatgtgctgggagattataaataaccttaactaacagtaaaaaaaattgtgcttacagaaaaaaattatttgagttagtctaaatgtattaaacttatcagtaagtagcatgaattaactactattcaagtgtaaaattctacttccatattacctaattcagttccatatgaagtcagccagcaaggatcagctgaggttggctgttgtgaggtttcagccattatgaaaaagaggagctgggcacagcctctgatgaataataacatggcatgggttctgataataagcacagagaatcagaaaggaaaaaacacagagaggagtatggagaactggaacctgtggaaaatgatacacaatttttttttttctacagagtctcgctctgtcacccaggttggaatacagtggtgggatctcggctcaccacaacctctgcctcctgggttcaagcaactctcctgcatcagcctcctgagtagctgggattacaggcatgcgccaccatacccagctaatttttgtatttttagtagagacagagtttcaccatgttggccaggctggtctccaactcctgacctcaggtgatatgcctgcctcagcctcccaaagtgctgggattagaggcataagccactgcacctggccccacaggcttcacagtcagtaggcccaaaggaagtctggtgtggtcgatcaagaatccagctaattctcgcactctcactgtctctctctttctctcaccttccactgacctctcttccctcctattttgtcttgggaaaaggcaggtgattacaaaattcttctaattatgtattttaattaatataaaatctttacaaaacagtgttaataccagcccactatggtttatattttttgctgtgaaaaaaaaatctcctatgctttagcaatactttttaggcagagagtcatcaaaataaaagagtatcagtattgctgaagtaggtcattcctgctttactttaaaaaatttcaaaacgtttcatttttcctccgtaaaatttatttctatcaaggaaatggggagagaaaaattacaatgaaaaactgtgaggataaatgaggtcatatgcctatgaaatatttggaaaagaattataattatcaacttgttcatttttaataccatagttagatttctcattttaaaaggggaaggaaagaactccattacattctagggattctaggcaagataagtttccatcacagttgctggatggtggagctgggctggtatgacattctttccttgtagaacgtgcgttctaactgaagactagccctttattagaaatgcacattgagaagacaggggatttatgagtcacaaaggccaagatttctaaccttgctacatgtggggcgggacttttctatgctcccaaggacttaaggtcaagtcactttcttcctgttcccgtctccttctgtcttcctctcttttttggttctaaccagaaaatgtattccaatttttcttttctttttctgttcaagtcttacagctctgccaaaggcaaaatgctgcagggattagaaagatgaagcagctaagtcaaatcgatagtgacagccagtgaacgcatgtaaatttcaacaagtgaacgttcagcattgtctctggggcctcccaccaatattaacatcactaaattttctgatttaacattctcacaaaacaggaatcaaccaaccaagtgccagccactaatagccttcaggttaataaatttggtcttcattaatctcaaattagagtcctggagtagacttatgtttgggataggagtgcccatcctacaagaagcttattacccataaatcaggtaagagataagaaaacactcctccaggtctcattagccacttcagataggctctgcagctctttaatgttcaggtggcatgtccttagaagatgagctgagaatcaaagctcctgatacaggaagaagcctaactcagcccatctctcttcttggggcattcacaattatttcctttaacccttgtgtagtttcagttgtgttgattcaagtcattattttcttacacaactagggtatatagtttagaatgtgatagaatcttggaaaaatagcaattccccattatgtatacacacaatacacatacacacacacagtactatatatgtatgtgtgtgtgtgtgtatatatagatcacgtaaatatatatgatatatatagatatatagagagagtacatgtacatatatgtgtataatatattcttcactttcattttatttgtctttatgatttcaggcagtggtataagaagatagaaatagcatatgagcacttcacacagtatctgctataaaagtttattttgacactttacttataactccttgaaagtgataaaattttcctattttcctgaaggtacatttagacaaaaatctcagagcctaatattttgaagtgttagttttgctgaggccaaacaaaatcaaggcccagcatataccccgaatacattctcacttaccataaatttattatgaaatggtattgtgttgataggagagtttttgttacagcctataacatttcagggattttgatagacatgatttccaatgggataacatttaaactgagatagctactatttttttttaatatatgtttagttttgtgaaaaaaaaaataaggaaagcatctggtgattgaacaaatatgtagtagagctaaagacattttccttaaaagaaatatacttgttttatgctttaatggttagagctgttccattatagtgtatcatctatactcttctgatttttattacaagtagggatacaacttaaagatttaaaagtccttcccaaagtataagcatgtgtttaattttcagaatggcagtgagacttacttgcacataaagttaagatacctaggttgtgggcttccaaggatacttccttgggaagtctttagaagttgtttttagttaaggacttggtagcatcaagggaagccatgagtggtgaaattctcagagagactcttctttctgtggtcctgccttgtagatgacattctggagacttttgtgtgtaaatgaatgattgaaattccatagtatatttgtcatttttcctaagcctgtttactctggggaaaatcttctttcatccttctaagttcttactccacactcccgtgggtgctcatgcatgtgtgcatgcgtacacacacaaacacacacaaatatgcatgcacacatcttcagtacttgaggcattaacctgcagaaccataacaccgtgaatatagcagtaaaggcaattatttctgtaaacaggtaacagggtgtattaatattactgttagtacctctgaattctttcttccttaataggatgtattaatattaccgttattacctctgaattctttcttccttcccatcatgctagagccatcttgaatatgacttaagaagtgatctttacattttgcctctgtctcaaactaggttctagtggctattaggggctagaccaaagctaaactgagaataaggttacgatagcacaattgttcataggtggtctctcaagacaacagcattgcaaaagaaggaataattgttatgtttattttacctatgggggaaaaacagtagtccgggcagtctaaatgatgtgtccaccatcatagaataatagagagtgaagctgtaagtataattccggttgactttgtatccagtaaaatgttcattcaacttttgttcatctctcctctagtcacactttgtcatgcattgacttcttggcctgatctcaccagtgaaaacccatgggaacagttaataattccatgactaaggctattataatcctatagctacagtttctccagtgaaataatgaaaatttcttcattaatttattataaaagttactgagtttaattgtatgccatcctggatttcttacagaagtgattcttgataatcctaagaaaattcttcttcagacagattttcaaaatgtttttgtctctgcaattactgttctgaggttagatcttatagaagttactccataagaagccaaagcattttcctcaaagtatagtggctaatggctatgctgttaccaaaagctgtgacagaaaacctctggctattaaactcatatctaatgctatttggcctagctattatgtacaatttgagaaactgatttttctcttctaaaatgaaacacaaggccgtgtgcggtggctcacgcctgtaatcccaacactttgggaggctgaggtgggtggtaatgaggtcaggggatcgagaccatcctggctaacacagtgaaaccccatttcactaaaaatacaaaaattagccaggcgtgatggtgggcccctgtagtccctgctactcaggaggctgaggcaggagaatggcgttaacccagctggcggagtttgcagtaagccgagatggcgccactgccctccagcctgggtgacagagcgagactccgtctcaaaaaaaaaaaaaaaagaaaaaagaaagaaaaagaaaaaaaaagaaagaaagaaatgattcgcattgtagggtcatgaatttcaacacatattacagttcagccccttctctgctgctggtggcacactggagatgtggagatgcagattctcaccacacaaagtggggtccgtcctggaagcttgtaagaaaagcagaatctcaggccctacctagaacctactgaattagaatctgtgttttaacaagatctcttggagattcagaggtacagtaaagtttgagaagcacagctggaaactgtctgaagtctgctatgatcatcttaatcttgggagctgacttagcacagtttctgcctctcccagcccagcctctctgccctatttaggctacttctggagagttccacagtcagaaccttagctatttctgtgcctggtctttaccacacacaggtccaaagatgcccaggaaagctaaatcatagacttccccctactgagcatgttgggctgcctgcagtctctccctttatcataggttggccctctttccacattgccatgcagctttgaatgactgaatgttcaaatttttcacagtgttttcattgcttaacaggacatccatggctgtaatttttcagtgaagcatagaatgtgttaattaaagtggcaatggaattgggacaggttgaatattaaatgtcacttctattgtgaataccatcatgctcttaacatttttattttgttttcatgaagacttagtaagggttaaaagtgggcgcattagtgagctggtatttgcctgcccaccaatgctgattttgatttccatggcgtagttctttggggtcagcatgcatggtgtgttaaatgttaccggggacctgaggaataggagagccctttccttatgacacttaatcctgaattatttatctaaataattaagggcaagcatttttaacttcgttaacctatagtttctgaataaaagagttattgagagctctgactcaaggacaaatgacaaaagatgatccctggagtcagggcatcaccctccataagtctcactggaggtttgcttcctgcacaaggagacatgtctgtgatttgtgaagcattcatcttgtttcacaagactttatgctgcacttaggctaaagtcactgccgaataagtcacttcactatcaagaaagaaggggatggcttttctgggggagcagaggcatattaaggtagaggaggggtggcgcaaagcagtccagccaagaaaaaaaaaaaatcttactaacaggcttagaattaccagcacatgttgatagcagaaagcagattggcttttagccagttttattcttgtttttaaatctctaaagacaacgtacccacttagtgcctgcacttggggcaacatgctcccactcccacctcctccttggtatgccagtgcagaggagtttgttcacacatttaagatattacataaaatacatctctgaaggtcgacactctcagggaagagcaagaaatgactggagcatcttagctgcaagataatgtcttattcagatatctttactctaggattatagattttttttttttttgagatgaagtctcactggatttcccaggctggagtgcaatggtgtgctcttggctcactgtaacctccacctcccaggttcaagctattctcctgcctcagcctcctcagccgctgggattacaggcattcaccaccatgtccagttaatttttgtattattagtagagacagggtttcaccatggtggccaggcttgtctcaaactcctgacctcaagtgatccacctgcctcagcctcccaaagagctgggattacaggcgtgaaccactacgcccagctggattatagattttgacactcagattactttggctggtctagtaggcaaataatgacaagacatgctcctgccaaagatgtccatggcctaatctccagaacctgtgagaatatgctacattgcatggcgaaggggaagggagactgcagatggaattaaaatagctaatcagcagataggaagatcatcctggtttatccatgtggacccaatgtattccaaggagtctttaaaagtggaagagggaggcagaagaagagagacagagtaagatgtgactaaggaagaatggttaaagaaatgtcgctggtatcagagacaagaggaggaggccgtgtgcttcctcttcatgtgggctatgcatattctcactcataggtgggacttgaacaatgagaacacatggacacaggaaggggaacatcacactctggggactgttgtggggtggggggaggaggagggatagcattaggagatatacctaatgctaaatgatgagttaatgggtgcagcacaccagcatggcacatgtatacatatgtaactaacctgcacattgtgcatatataccctaaaacttaaagtataataataataaaattaaaaaaaagtcaaggaagtgaattagaggtccctagaacctccaaaaagtaatgcaaccctggatggcatcttgatattagcctggggagacctgtgtcaaacttctatcctgtagaactgtaagataacctgtgtttttcttgtaaaagatttcaacatttgctttagattcagggggttacatgtacaggtttgttacatggcatcacctagatagtgagctagtacccagtaggtagttttcctgcttttgcccccttccgtcttccccctcagtagtccccagtgtctgttgttcccatctttatgttcatgtgtatccaatgtttagctcccacttataagtgagaacgtgtagtatttgattttctgtttctgtgttaatttgcttatcaacctgtgtttttaagcctttatggtaattacttatggagcaatagaaaactagcacaatagataaagtcaaaattggtatggtatgtagaacctaacagagcacggtcctggctccacatctgattagtaatgtgcaattggtaaatttctttagccttattatccttatctgtagaatggacataataatatttaccttatggggttaagagagaatgaaataagaaagcaactataaaatgtctgggataatgcctatcagggtggggctgcccaaagatactaaatttgattttatttctttcctcttatacaatttggtggccctcttagtgagtggccccatatcgttaaggcttactgctaactggcccccctgagtccttagaaatatcaccacatttattgatatttcactgtgttcctctgagaacctcatttggccatatagtcttctaccaatcactggagttttcattagtgctagattggcattagacacatggttatagaaggatctagtagattattattttgtaggagacatcatcagtgctcatgttaaatgaatgatacattctgttgaattataaactgcctctcctacacctttgtctttgtacatttcagtccttcttctctattcaaaactgacgaagtaaatcagttgggaagaatacagtaatttatttgaataaacatttgtcaacattgtttaggaaaataagttacaaattgactgtatcgtcatgttcctgcactaagaaagcattaggagtctgcctaaatccttttatcaaaatgtattattattattattattattattaatttttttctatttactctttcttttttaaaaaattgctctcctctagatattttttctgccactctttataataaaggagacaatatttctaactgcccaacagacttcaagatgatcttgacagcctctgtagccaaattatcatattaatttgatctcagcaacacttctggttcactctgttctgtactcaaatccaaatcctgagctttttcttgagcaaataaaggcaacagctgtgaggtcccagttcatctttccggttttacccatacaacaacaggctgtgcaaagttgtgagcaattcacacatagtgctctcaactctatttttattaagtactctgaagagcaagcaatcttcaaactcctataaaatttcatgaccaaaacagctatcgggatggtgtttcccttgaaatgtctctatgagtacagtcatttattattctaggcttcctgataatccttattagtggataccagaactgtgattttaccgtatttgcaacctaatgagtaagtctaccacatgaatgctggcagaagatacaagattcctgggtcagagatgaaggatagtttattgctacaggatagcagaataccagcatttatgccagtccctaaaatttaagtcccatggggcaaagggaagagggccagacaatgcctgcagatgtaataggggagagttgagtttagggtacccccaaattttataataggcagtactttggtccagataaagacatgttttttatactggatagtagacaaacatccatttgctccagttggagacaatacttctgtcttcccatagatgttcactgtgcaaacaattcttgaaacaattgcctggaacaaagttatcagttattagattttttttttttttgagttggagtctcactctgtcacccaggctaaagtgcagtggcatgatctcagctcactgcaacctctggctcatggattcaagagattcttctgcctcagcctcctgagtagttgggattacaggcacccaccaccatgcctggctagtttttgtatttttagcagggacagggtttcaccatgttggccaggctcgaactcctaacctcaagtgattctcctgccttggcctcccaaagtgctgggattacaggcatgagccaccacacctggcccaaagttattagatcttctgttcacaagatacacagaaatgtgagaggccataacaagttgtcaccctacaatgagtttcttagatgtaaatcgactcttcccttcctatgttggtaagaattgtgccatatgaaacatcatcataggcatatgtaatgttaagcttttttgccgtaagagaaaatttttccttgcttccttagcagaatacaggcttcagttatgtgatcaacctgtttggatctgctaggttaaactataaatgcatttttaaaaatactacagatatttcactggacaggaaatggggatggggaagacagaggagagagtgtatggcctggtaacaaagcattaccctttctgttgcacactgctgcccattttaatgttggccagcagccaggacaaagagccaaggcagctccaaaggatctcagagttggaggcaagagagagtcaaggaagctcccacatgctgaaatgtcaaacctaagcagacctggcctcagagtacaacacaatcagatcttccaccatcagagtcattgatagccacactggctcccttgctgtttctggagcacagcagacatggacccacttcaggtcctttctgctggctctggtctgtcataggtacactccttcacctgatcacccagggatcgctttcttatttccttcaagccttcttcatccaagtactgaccaggcctcacactgcttagcttccgagatcagctgagatcaagcacgttcagggtgataaattagttcaatcactgtggaaagtagtttggtgatttctcaaagaacttaacacagaacaagcattcaacctagcagtctcattactgggtatatatccaaaaaagcacagattgttctaccaaaaagatacatgcactcacatgctcatcatagcactattcactataacaaagacatgaaatccacctagatgcccatcaacagtggataggtatacatatgatacgtatacaccatgtaatactacgcagccatacaaaaggtatgaaatcatgtcctttgcagcaacatgaatgtagttaggggccattgtcctaagtaaatcaatgtaggaagagaaaaccgtatgccacgtgttctcacttttaagtgggcacaaaacattgggtacccatggacgtaaagatgggaacaatagacactggggactactagatgcaggaaggtgggaggggtgaaaaagctaactattgggtaccatgctcggtagttgggtaatgggattatttgtatcccaaacctaagcatcacataacataaccaagtagcaaccctgcacatgtaccaatgaatctagaattaaacttgaaaaaaataagtaagtaaaacataaaacatatagatttttaaaaggcatcttcaaatgtcaccttgtagtgccccaccctgaattgtagtcacctacacacataaactcacacacaaacacacactcccatacacacatcaaaacattcaatacacctaccttactctatttttttttctgacttccaacatagtacatcatttatttaacaagaacgtaagctcaacggggaggaattgttctctgtttattttctgatgtttcctaggtacctagatcagtgcctggtgcatatataaatgaatattttgagtgaatatttgtggaatcatgaatgaatgaactgatgaatgttaatattggtatttttcattgttatttgtcttattcctaggaagacaggactagtcatttgaggtactttttcagaacagccagggctggggaggatcctttatttgtgggtgttaaataatagcaagtgaacacagtgcagcagtagtgaccctgttgatgatgataatgaatcacattgatatagtgcttttctttttctacctttgtgtgtgtgtgtgtgtgtgtgtgtgtaattctcctcagtgtcagggtgatagattatgcccattccttctaggaaaatggttattccatcttaatgcaggcttttagaaatgaaaaataatgcctgctacaatcaacttttaattatctacactaatggagtgctgatgctaaagaaataatccccaagtcatttacatttgactttaggatgcaaccgagggcttgtattcagaaaagcacgttaaaccatcgtcagcagcatgtgattgcagaacaaattctggcctgggagttgggaaactggatttggtagaggctcggtgttatgggttgaattgtgatgccgcccccctgccaaaaagatacgttagaatcccagcccccggtaactcagaatagaaccttatttggaggtagtgtcttgacaaaggtaattaagttaaaatgaagttgtttgggtggaatctaatccaatatgactggtatttttatagaaaggggaaatttagactgagacagagacatgcatacagggaagaatgccatgtgatgcctggaattatgctgccacaagccaaggagctactgcaagttagcaggaaggcctgggacaggcccttctctagcacctgcagaggaagcagccctgtggacaccttgatctcaaacttccagggcagtaagacaaccatgtctgtggtttaagctaccccattcatgggactttgttatgacagcccttggaattgaatatgcttggtgactcaactcttatgtgctcatctagcatacagttccctctcatctccaagcctccgtttcctcatccctaaaatagaatccaaagcccctagctgtttaagggctctataattagaaagcttctgacagaaagtccccatcagctcctcccagtttagcagtaaacccatccacctaggtgtcctctaaattaggtaagtgaccctagaagaaagttccacacatcatctgaaccgcggataaaatgcatgcagaaatgactttattcaaattcaagagtttacattttacttaactctggaaaactcagagtttaaacattttcacatttttttttaaatagcaagaatggcatgccacatcatgatgattcagctctcatctctatttctctaggcagaatgcatttacacatcatccaatcccaccctatttccatgtactattagcagaagcaaatatcagccttcttcaggccctggcaggataaaaattcagcccagtagacactgggaggacaagaatgaggatgtgacttacattccccagggccatggcattcaaaaccaccatacccactgaatgtgcttctctatcgctttgtttaatatttggagagtagtgtttgctccaaaacttgtaaaaagtgagaccaatggaaaccattggtccaaagcaatcttacctgagaaacattttaaaaagaagtctttcccttatgattcctcttcttactctacttttttgaataaagagattaatacccaaccgatgactactgcaaggatgaaggttattctttaggagaaaaaaaaattgtaacatacatttttatgaaaaaaagatttctaaatatgctgataaaatcactgacatctcagtaaatatagtttattcctaggaagtgactagaatgattgatttagctatatgtaagttatttaatactgtttgaaaggtacttcatcaacaccatttactgtgatcaatagcattttcaggaacacttcagacttggggaggttactcctttgggtaaccttttaggattatctgttgtgggaacaagaagtagccatcaaaagccactgagcaggctgggtgctataatcccagcattttgggaggctgaagtgggaggactgcttgaacccaggggtttgagaccagcctggacaacatggtgagatcccctatctacaaaaactatattaaaaaaatttagcttgttgtagtgtacacacctattgtcccagttgctcaggaggctggggtgggagaatcacttgaccccaggaggtcaaggctgcagttagcattgcttgtgccactgcagtccagcctaggtgaaagagtgagaccctgtctcaaaaaaaaaaaaaaaatgtccctctaagcagttaaaataggtcaacatcaaagctcatggttctggctcttagtcaaagcctatttatatctgacataattctcatatattgcatatattgacctgtttggtttactaatccacattagaggccaacagtatagaaccagaatcagaaaatctattaaaaggaaatgaaagaataaaaaagcatggcaatatcaggccattaggtgtgggtacaaataatctcccaaaccacagtagtctctgagtgtttcactgacaaagtttagttatcgataattataattatgaccttgaaatcctagcgtagacattgaatactatgtttggaagtcagggaattgtttaatatatttaagaaagatattcccttcaaagcagttcaagtggtcttagtattgccagttaaggaagtgggttacaggatcctggaatgactcagtgatatagaaaggctcagtccctggcaatgtcagatgagtgaagaggttgatgcaaaagtaattgtgatttttgccattacttttaaatgtaaagtacaggcactaacatagtattagttactaatagtattagttatttagtaaattacttttgtactaacctaatactatgttagtgcctgtacaaataatgtgcagtaaaaacaatgagtgtgtgtgtgtgtgtgtgtgtgtgtgtgtgtgtattggaaagcagttgatctgtacacatacttacagtttactaaacaaatgtttgagtgcctactgtgtgtcttgctttggctgtgctctagacagtcatgataacagagatccctggtctggggaggtcccactctcagagcaattacggaagaagggtagaggaaatcatgcaagtatgtagggataggctgatgagagcggaagcatgagggctgagagctgcaggctgtcttcccactagtcagggaaggctttctgattaaagaaaattttcatcacctatgcttagaagtttagactcagaataactgatggcaaatggaaaagatgaaataaactaggatgagaagacaagactgcccaattcacacaatgaatccagtctctgaatcagtcgggtgctagccaaagcagaaatatttccagcagagccctgggaacagagaaggaggcagtttttattaaagtcttagtttccaaatgatggatgccaacaagaaaatagtttaaaattccaagagaagccttcacctttcattccattgtagagtaatggctttttcaaacacattcaaataaagccagggttgttaagtagtatgtctcaatcaacatactcaaagtctgtgaaccaaaggcatagtcttaggcttcctcttatagtctagcatgatattattctatttcatctttttttatatgtttgctcccttgagtgttttagaatgagactgctagattttatgtttctaaagctggttttctaccaggcctgttctcagaacattcttttttttttttttttttttttttttttttttttaagatagagtcttactctgtcacccaggctggagtgcagtggcgcgatcttggctcactgcaaccttcgcctcccgggttcaaacgattctcctgcctcagcctcctgagtagctggaattacaggcgcccaccactaaccccatctaatttttgtattttttagtacaaaatgggatttcgccataatggccaggctggtctcaaacacctgacctcaggtgatctgcccgcctcggcctcccaaagtgctgggattacaagcatgagccaccacgcccagcctagaacattctttcttggaaaggaagaacatcacagccttctgtgcattctcttgttcacccacataggcaaggtgatgtgtttgcagccttctttttaccctcacctctgggaggtggccttggctcatcacctattgtttcatgctctctcttaaaggctgatttggtgactgaattcatcattgctgcctacacacccatggggctagcctgggcaaaatgtgcctcgtaggttgcctgaccttttgccttttggcaacgtttatcacctctgaggattcagcttctttcgtcagaaagtgagaacttggatcaggtcatctctaaggttcctttcagttttaacctttcagaagtcacacaaccataaacatttggtgtacctagactgttggcttattgtccgactttaagccagtcatttcagttaaacaaacaaaaatgggggcttgccagagtcaagtcatacaagactgctttcctaatatttggtgcttcttaaatgaagttgttatttatgcatccctcaatcccctccctcttctgcatattttgaacttgcaaagccttctgatattttaagcagaaggttgcaaatgcttgtcctactgcctggccaagtcttaggtaaaaattgtcacctaaccacatcctcagatcatttcccctgtactctagatcactaagcgcatgtgcacacacacgcatgcacgcgcacacacacacacacacaccatccaggatcctcctgaggatgaatgaatattcctgggccaaatattgcatgaggatttgggcaatgttttggctagttgaacaacaacaatgctcatatttatgccaattggcaggaccattgcttgatcatcctgtacttggtgaagggcattttttattgtttccttttttgtttgtttgtttgtttgttttgtgaggcagaatatcaccctgtcccacagactggagtacaatggcatgatcttggctcactgcaacctctgcctcctgggtcctagcaattctcctgcctcagcctctcgagtagctgggattacaggtgcccaccaccacatcgggctaatttttgtatttttagttgagacagggtttcgccatgttggtcaggctggtctcgaactcctgacctcaggtaatccacctgcctcggcctcccaaagtgctgggattacaggtgtgagccaccatgcctggcccaagggcattgttttctaatccagataactaagctatccttagggtgatatgtaatgcagcaattgctagaaaatgacatgttttcataatggatctttctccaccatctagaaatttaggtaaagttgaaagaaaggataggaggaaccatttactgtgcacctactttcttcctgagattttatacatgtcatttgatgtttacaccaagtttttgaggtcaatctcatatccaaagctctaatcaattaactttaaattagttaatgacagggctctcttattcttaaacctgtcatttcccctaaactatgttgttttcctaaagtgagattaaaagtttgaaaacaaaggaacaaaatgttcatttatttactacgtttctgaaaacttgcatatatcttaatatatatatatatcttatttatatgtcttatttcattgttatgaaaacctagctttctttccttctatcctttcaatattatgctacttgtatttagtatttacattgtatgattcaaaatattgttcactgcagagccaagtagtagactatgaccgctctgcttattttgaacaatcttttatttttttctggagttgataattgcttcagatttttgtctggctttttataagcctgttgataatttcctgtttattctaatgtctgtcatatgcctatccatggagttaacctagtttcattttgtttttcatggccacatctttatcctcctttctgtgggggccctcagcttctgctttaattccagctagatactttctgctttcattcccgctatatactctaattccagctagatactttctgctttcattcctgctatatactttaattccagctagatactttctatgtgggctgcaaaggtgtagccctgatacttttctcatctatcatcctgagacttcatcttacaattaccctgttttccaaatctcatgccttctacttccttcctttactctccatttagaatatttttcagcagcttctaaattagcctacataagacataaactcttagatcttacttgtctgaaatgtctttcacatatgattggtatttgagctaaacataaattagagattgaaagtcatttctcttcagaattttgaagacttctctactctttttctttctgctgttgtttttgagaagtccaataacatatttctaatcctttgtattttgtttcctctctgaaaactacttagatattcttttattacaaatattctaaaatttagtaatttttaaaattctctcattgttttaaactttttttttgagtggagtttcactctttttgcccatgctggagtgcaatgacacgatcttagttcactgcaacctccgcctcctgggttcatgtgattctactgcctcagcctcctgagtagctgggattacaggtgcgcaccatcatgcccaactaattttgtattttttgtagatacaggatttcaccatgttggccaggctggtctcaaactcctgacctcagatgatctgcccgtctcagcctcccaaagggctgggattacaggcattagccactgcacccggcctgttttaaacatttaatggactcaccagggaattttcttgtcttattactttgataatttcctccactccattttccctctaatatttttactttcggggattcctatgagtttgacattggttcttctggactaatgtttcctctagtgttttttgaagatgtctttttggattaaattctagaaaccgcctcaactttatatttcattgttgctcttgatggttttaatgcagatactgaatttccaagagtgctttagttgttctcttagtgttcatttcatagagcacgttgttctcctttaagaggtcatatcttctctttaacttccaggatttttttaaccgttttgtctgttctttatattatgttacttttctctcatttgctccacttcctccccaccccacccctgtttatttagatctcttcctttcatagtgaaggttcttctcaattcactagctacctcaactgtccctttgtatttgagaacaaggcattgagaagcattattttggaagctctgtgtgcatgaccaggacttgtcaaagactggagcttatcacaaggggatcagatagaaagctgtcttttctataagaggcattcccaatgttagtgtctgcaggccttctagaactggaagcagaaagtccctcctcggcatgtagagtctcactcattcccgtttgcattccatcacctccctgccctgagccctttgcacttgtggtacatgttgtttgaagtatgatgcttcattgattagattccttcaggggtaaaatctccattctcgtgtggggaaggtgatactttaagtcacctggctgtgcagcaacagagagggaccaggtagtctaataacaccttatgcagacttccaactcttgtttctcactataccttattctataaacttctggggaaacggctttctttgaattctgagcctttcttaggtatatttcaggccaacttacttgtaccttgtccatacacttgtcaactggcacccaagttcaggcagtctccattttaatcaatcagctgctgctcatccacctttcattttatcttccaaaatattgttataattcttatgcattggttagcttcttttctttaactttgtccttgtggattactactcattttggtcttttattgttactttagtggcatttcaggaggaaatggaatggaagtgtgaggtcaatgcagcatatcaaccagaatctagcctgaattgcaactgtctcacaataggtgccggactctgcagttatggttctagatagtacaaaatttcctctctcttatgagaaatatgaaatcatttaaagcagttaccttttctaaacaattccatggactctgagtcaaaataatttggcaatcatttattccaacctctcctggatgcctaaactatatccctaagaggtgattttacaatcttgaattgaatctctccagtgataaggaatttacttacacatgaaatgattcattacattttcaagtcatgttgtggtaagagttagagtgcttctaagtatctttgttaactcctaaaatctgagtcttacaaataactgacttatcaagttgtaaaaagtaaagagaaaatccccatttctcctactttaaatagaccgtagaaaataatgatgtccaaatttgtcaaatacgtcaaactcaactgcatataggaccattggtgtacttataatccaagaagtgccaacacaaccatatggcatcagttgaagggacctcaagaagttaatgtggatttcacagtggcaaggctgatggctttagtcttgctgaaagttctgcttgtttgatgagaaatatttatataatattttcagaggcttatttcttgtatgtaaactctcagatgtgaaagggaattcatttgctgcatattgattagctcgttgagtgttaatttctcatggttgtggtctgcatgagagaactacaatcagctagagtcaaagaaaagtggatgcttccaccagctgatttttattttatttttatttataatatggaacactactgtaaaagaatctttgcctgtctttccactttataattataaagaaaaggaaaaaaagaggttagagggcccttcaaggtactttaaaatgtttttttcttagcaattcaaaatgtcctagtgaaacgggagagttccctgactcccttcacaggacttgtgacaggggtgtcttgtttatttggcctcagtgctcaaaccccttatgggatggggaacatgcaggtgcacaggagcagaagccagggtgagtgcttttgggctccagccccacagtggtgtctaggggtgttacaatgctcttttagccctgccatctggagatggcttaagtgttaaacagctcagtgaaaagtcagtgtgacagccttttggggttcccatacccagtgtgtcctgaattcttgttcagtgtccatgaagaatgaggtcatacagacctgaaggctggtgaatgtggggattttgttgagtgatggaggtggctctcagcaggaaggggaacgggagaggggacggagtgggaagatgatcttcccctgtagttcatcggtcccgtagctgatttcctctctgtccacagctaaactcctcttgaccttcagacacttcctctcttccctcctctgctgcactgctctgctgctctgccactcttctgcttgtggagcctggatattggggtttatatggatgggcacacgatagggggttgcagtgggtcaaaaggcaacatttgggtgcaaaaacaggaatgcctgttctcacttagggctgcaggtctacgcttgagggtggaaccctcgccaggaactcttttgcctcctgtccatatcactaggaagaccattgatgtgtttgatctttgtaaaactacatatgactctcaagttgcaagtgatactgtggttcagcttatcaaatactggaatttggcttctgtcactgactctgccactggctttgtggtcctgaacgcagccctgatgtcagatgtgttggtaatcttggggaactttaagcaagccagctttttttttttttttttttttttttaggactagatggaggtaagggaaagtgtgagacaataaaactggcaaccagaaacagaagaagaaaggaagagagaaaggaatctacggagtgtggaagttttaggagtaaatttctatataagttgcaaaattttagtaattctttagttcttatttcatttattcacttattttttttttctttttagacagagcctcactttgtctggagtgcagtggtgcaatcttggctcatgcaacctctgtctcccagcttcaagcagttctcctgcctcagcctccccagtagctgggactacaggcaccagctaactttttttatttttagtagagatgggatttcaccgggttggccaggctggtctcgaactcctgacctcaagtgatccaccttccttgtcttcccaaagtgctgagattatagacgtgagccaccacacccagcctcattcattcatttattcattcaacaagtattaattgtgtgcctactataggccaagtgtattttgggccaagtgcatttctatgagctaaggatatagcagggaataaaacagttacctccatcctcatggcacttacattcatgtacctgcaatccccatcagaatcagcaactaggaagagatgatatcagagcttgaacgtggatccagtaatacccatggatagttctgtggaagtaccacagagaaaaattcaaaggaaagaggaataggatatattgagatacaaaaagtgtagcaatggaaaatcaggtgatcagattattgagaatgaaatatctttagtaaagatttgaaggagttgagtagagatatctcctagatatctacacctacatagaagatcatgccaagaggaggagcagcatgttcaaaggagagaatgggtatgacatgtttgaagaatagtcagtagtttggtatggctacagctgactcagtgagatgggaatgaggtcagaaagatgaggaaagggcagtccagattgtgttgggctttgcttgcaaaaacttcagctcttacttggtataagacagcaaaccattgaaagagtttgtgtagaggagtgacatgatctgacttcttttttaacaagatggctcttattgtatcattaacagcatggttttacatgaacctatcgttttgtttagtttgtgggtcaggactgaacaatgaaagtagaagcagtcctgtgacagtggcactaattacatttattgtcatagagaaagctcatgccagtcacatactagtcagaggagttttcagtcctaattgccacagaacaaatgactttggatgttaaatggactatagtcccctcatttgcaaagtggggatagtagtatctatatagtgaattatgagaagtaaatgagaaataacatttgtgaaaatgtctgacaaaatgcctgaggtgttaacggatcttttaaaatgttaactgtagcctcaatggattgtaagaatatacacatttaaacccattgacataaattatggctagaatgaaagttttgatcatcttgatgatagtttttgtcttttgggtttctttcttgtgtgttctatctgaagaaaatcatctgaaatccctcatttagaaattgaaatattttatgtcagcaagcacatatgttaatgatttcctgaatcagaaatgtgttcaaaatcatatctatagcaatgatcaccacagcggtagttctattagggaaaatacacgaaaacaaatataaaacaataacaaattaagtaactaattaaataatgtgtggcatggaaataaatgaaatactgtgcaaccttcgaacaccattttatagaacaaataatcattggagaagtagacgtgatatgttgttaagtaaacatatcatataaatggcttagaggcttagagatgtgtaggaaaggaaatactctaaaatgttaacaagaatggtatctctggtgcaattaaaagtctttttaatttggatgggtttttttatattttacaaatatttctgcattgattctacattacttatgtaatcaaaggtgcccaatacgtgttacttaaagaatctcttcaataattagaacgtaggcactcaatgctcatttttttccccagtgattctctgaacgtgtgttactaccatccaggagcagaactatatcttgctgagacatttgtgataatgacaaaacgtttcaatcagaaatttgagataaggatatataaatgattttttctcatgagaaataaaacgcaggtgtgttcaccaaaatcctgctcttttactcaatccccttggccaaaagtaagcacgacctctctggcattgtgaacaaaaagaggaattaactcaaaaagactaattttatgcattagatgatcctttagaataatcaagcatatgagtattagggtaacttatcctttttacttttcctgagggaggtaagagtagcaccgacttgctactgctaaagatatggactattggcctgggagggtaagcattttctgtctgatttaattaagaccactacctgctgacaaggctttgagaaagaaacaaaaataaggaatgcacaaataaaatgtaatgcaggtcaggcatggtggctgatgcctaagtgggaggcttaggcaggtaatcacttgaggccagaagtttgagaccaggctgggcagcacaccaagaccatctctctacaaaaaaaaaaaaaaaaatacaaattagccatgtgtggtgatggatgtctgttgtccagctagtcaggaggctgaggtgggagaatcccttgaggccagttcaaggttacaatgagctatgatcatgccactgcactccagcctgaacaacagaatgagaccctgtctcattcaattctttaaaaatctaatgcaaaaacattagaactgaaactagaaccagttttattggaagatgatggaaaagcaccttgtgatttatctcttttggtagcagagagctcatgatcgtccatctaactcccacaccatcttggagagccacagggtatcctacattatcctgctgaagatccttcagtacctaatggctctcgtgaagcattccaaagtgaaagtcatggagcctatgccactaaatcagatataactagatacatgttggattaaaaggaaaggaggaaaggcatagaagggaaaaacagagattattggagaccaaatacctctataaattctcaaaatttgtttaaaggctttactttttcaagatgcatattttggcaatagcttacgaagactgaagttttcttatttaatcttagagatactaatacttagaaaagaaaagtcttctatcttgttgaccttctctgtagccatttgaaatcttcattatcagaataatgcccctccatgtccacaattattaatttttatagatttagggggtacaagtgcagtttcattacatggatgtattgtgtaatggtgaagtctcggctttttgtgtagccatcacctgaatatagtgtacattgtacgcattaagtaattcctcatccctttcccacaacctccacccttctgagtctccagtgtctataattccactttctgtgtccacgtgtacacgttatttagcagccacttataagtgagaacatgcagtatttgactttctgtttctgagttattcatgaccagaattattattctaattattgtgaaataaaaattatgcctgactaaaatgactgaatccagaacttcaccataatccatctatctcctccgtgagtcagtgcatattacctattccaatgacctcttcagtactgtaaatattactgtgttccttttatttacttaataaatagatgtcaaatgtgtggaaaacaacatttgttttttcaaatacatgtttataacaccctttggaggaagtaagcctctagaacatgacagtctctggggtatgctattttcaggtaattttaaatgtcgctttccaacaaaaatgcaatactattatctttttttttaatgacaaagaaaagcaaaacaagtattatattggtgcaaaagtaatgcagtttctgccatttctcttaatgccattactcgtaagggcagaaatgaccattacttttgcatcaacctaatacctccagattttagatatttgagtgccattgcttgatatatcttttgttttttcttctggaaattttggttactttagttgcataaaggatgacttccattttaccctgttaagcatctctgtctggtcagaagctactactctgttctttctagttcagtagggaacaatcagtttccttctcaattttcagctaatctttatgaatgaaatttgattaaatctagcaaaactatgcaaacatcataacagcatatggggagccttcctgtagtaccagtgggctatttccgtctaataacagattcaaaaaatccaattagacagtttgaaaaaagaaagccagagttaaaaatatctgactgtttgactgagaacagcagggaatggtttataggccaatcatttatggtgaataggatcttagtggtgagcaactcacatctctagcccattagaataatgtgttactcatattgctcctaaagctttctacttaattataccaagttaaatagcagacattctcactcccttttgatggaaaatcacatttattcacccacacaataccatccttgggtgttaagggatgagagttgacctaatgggaagacaaacaaatggtttaggaaatgagacatgatttttttacacaaaggttaatgcacgagaaaagaaatgcctaggtctctgtctaatgtctatgtgttctcatcgaataattcttaaatgaccctatttagtttgattttctaactacattagaaatatatgaaacaattaagaaatcattttttacctgtcatatggcagatggactaacattgatcagggcagtcgaggaggttgtaaggaaatgggtactctcaaacattgctggtgggactatgaagtgttttaattttttttttttttttagacggaggtttgctcttgttgtccaggctggagtgaaatggcgtgatctcggctcactgcatcctctgcctcagcctcccgagtagctggaattacaggcaccctccaccatgcccagctaatttttgtattttcagtagagacagggtttcaccatgttggccaggctggtcttaaactcctaacctcaggtgatccgcccacgtcggcctcccaaagtgctgggattacaggcgtgaaccaccgggcccagccaagtgttttaatttttaaaaactatttgaccatatgaaaatatagatgttccattaaatatatatagcctaagaaatataatcagcaatgcagtaaaagattatgtatacggatgctcctgacagttggatttacaatagggaaaagctggaaacaacctaaatatttgaaaaaagagaatggtaaatacatcaaaaatacaataaatacagtgttaagtgaaaagtttgtgcaattttgacttgagaaatttttaatgtactatgactacttggaagaatatggatgtacctcaaaataagtaatgatctatatgaaagactgtttttgataatttttgttttcttatacataccttccaatattgtccaaattttcaataataagcatgcatagcctaatatatcatgtagatgagtgcaaaatgaacacagagattaagatcatgggcttttcaatgaaggtctgagtttgaatcctgtctctgccatttactagcaatataatttcaggaaataacttaacatctctgctcttcagtttcctcatctgaaatataaggataataatggtatctgtgccttaaggatgaccaaagttatagatatcttaagaatgaattaaatgcgtttctctccatggactattttaacaatgaatgcctgacatagcaattatgttccataatcaccattatttatttataaaattatttagtattatttaatactaacattctggttttataaaaccaaattttaaaaatagataagtaaatgaaaggacaaggaaaacctaatttcactgtttttctagctttttttattgctataacttttatatcataaatccacccatttgaagtgtatagctccattttactatactgttttcatttataaaagccttttataaatttatacatacctttcagtgttgtttgaattttccatagcaagcattcatagcatagtatatcatgtagcagggtttaaaataagcatagaagagggtttcgccaaaagattatttaagaaaatctactaaaagagggttcttctgaaaaataaaatgtatttgcttttatcaaatgagcaaacttcatccacttggagatcacccacatgtgaatttctttctttctttctctctttcccttccttccttccttccttccttccttccttccttccttccttccttccttccttccttccttcttactttctttctctgatggtaagttacattagaggacaggaaggctcagtgatcagttttgatgggatggctgcacagaggcacatggagaagaagcaaggaagccaccttcagcttctgggtctctttgttatacaggaaaggaagtcaactggggtaaacctgtttggaaaggattgagtccttctctcaattttgaagggatgattttttagttcttcagatttatcttctgtaaataaatttcttcagaagcttcctgcaatatgataaacacaaatgattaggaagtgttttgtaaggattggggactaaagaaattattgatgaagccagaatgtgtcaaaaaggtgtcgtaaagcagcaatacttaaacattttggtctcagagtccctttacaatccaggacccaaagaggtttttttgtgtttgttttttgtttttttctaaaatgggttatacctatcatttttttcatattagaaattaaaactgagaaatgtttgaacacaggaatacccaagtacatattccagtgatcagcagagcaatggcatcatcacatcatattgcctccagaaaatcccactgacaatttgttgaagactaaaagggaaaaagccaaacaccttagtatgctgtaaaaacagctttcatctcacagacctcccgaaagggtcttgaagatccatgagcaatccctggaccacactttgagaaccgcttttgtaacgtgtgaccttcccttatcctctgccatgcgaaactatctcagaatctaagattgtctacagccacggtacaaccagctctgagactttgaagagaagaaaagatgaacttcatcactaaaaaagccaaagtagttgaaagcaaacactagctgaattttcttcctccaagcctacagaccacctcacgtagtagctgtagtgggagctgctcccaagatttgataagaattagtaaagaggtttataagaccgtgtgtgcagagtctcacagttgctgatacttgttgggcttagctttatctctgtctacagtagcagcccaggacaaaacattcatatgatattctctctttcttctttaaccatagataaatgtcccaagaaaagggaagagaaacagaaaaatcatacatgctaaacaccagtttattaaatatatttgttgctgtttttcttttttacttggttgctcacaatattaatacaccctctttataaaacatgaaagcaatacaaaagtataatgagtaaaatgagaatcctaaaatgttttcttccataatcctctctctaatcgcatttctcagagataactgtgttagcattttggtgtgtttcttatagccctttttgttgtcaaaaataagcaaagataaaggggaaagattttgttctgtttcttttttctatatacacagtatatcttggagatagtttcaagtgccaaatacatgcatttatttttttcacagaatgcaagtcatgtcatagcatggatgaagttgggtttatttaatcattcactagttggcaggtatttaggttgtttacagtttttccattttagaaacagtgttcccatgtaaagaatgtcccttgtgcataaatcgttgtgacatgtgttggaatctcaaaagtggaattgctgagccaggggcatcctcattttaaaatttaatagacatcatcattatcctctagcatgcacatcactttacacaactgatggtaatttatgaggaattctatgtcccctcactccaacactgcatctagtcactctttgaaaattgtccagtctaatgggtgaattatggcatcttgctttgttatgcatttctgtgattaccagtgaacttgaacatctttccatatttttatttatgtttaacatcgaaacacgttacgttttgaatattttcctctactctattactgccttttatccttgattatagtttcttccatcacacagcaggcttgaatttttgtgtacttaaatttgccaatcttttcatttctggttcctgagtttttttgtttaacttaggaaccacctcctcccatactatctccaaggatagaaaaatactgttttctcctagagcttttgtgaactttattttttacaattatatctttagtccattgatggctgtgccttttaaataatgaaaagtccatatttaagttatttttttcccaaatagataaacatttgccttacaggatttagtaagcattttatcctttcttcctacatttgaattgccacctttaacacagggatattaggtaacttaagaggtaaatgtgtgtttcttgaatcccagatctaccacttaaaaattatgtaaggtttgatttactgattcatttttcctgccccaccaacttcatgaccataaaataggggcaggggagaaggaaatgataagacttagcatattataccatatggaaattaaataatacacataaaatacttaaaatagcgtcaggcaatttaagagcactcagtaaagttagctcttattaaatttttgcaactccatgtatacctgggatctgtttctggtttgttcatggcagcattgtcaactaaaactttctgtgctattcagtgtgatagttattggacacaatgaccactgaaaacatggctagaatgatgggaaaattaaaattttaattaattttaatttaaagataaacagccacatgtggtcagtaagtaccatattggacaggagaatgcccatatagtattttccatgagctttcatgagttatgctttattatataaaccagattttatttaagaactcatatggactagattatgaattttatgagatgattttccttgagtcatcaagaagaacacagtttttttctttaatctgttaaagttgggaagtattaatataaatctagttcctacttgaaatcaacattccagcaataaaccttattggttcttgttattctttgacctcacggttaaatttgatttgctaattttggttagagctcttctatattcatatttgagattattttaaatttgcattgtgcattgactgtgagatgagtattttgttggcttggtaaaatgaattaggagacttcatattctaaattctgaaatagtttgaatattggagttattatctgttcttgggagatggtttttatcaccagttcccctaaactcctttttaccttgaggtaaagcaaagtctaccttactatttcttgtatggtgattggctattcaggttttctatctattattaagacaattttgaactcactggtgctccaaagaaaatctgaatcattctattacaaagatacaggctcacatatgttcactgcagcactcttcacaatagcaaagacatggaatttacccaaatacccatcattgatagactggataaagaaaatgtggtacatatacaccatggaatactatgcagccataaaaaggaagaagatcatatcctttgcagggacatggatggagctagaagctattatcctcagcaaactaacacaggaacagaaaaccaaacaccacatgttcttacttataaatgggggctgaaaaatgagagcacatggacacaggagggtaacaacacacactggggcctgtcggggagcatgggagggagaacatcagaataaatagctaatgcatgttgggcttaatacataggtgatgggtcgataggtgcagcaaaccaccatggcacatgtttacctatgtgacaaacctgcacatcttgcacatgtatcccggaacttaaaattttaaaaaaatttaaaaaaaaagaaaatctgaacttgggtagcaatatctctacctaatgatactcttgatttttaagtacttaaaatgagtctgaaactgtagaggaagaaaaattcttcctaccaccctcctcctttctctggctggggctttgtaaattggactgacaaagacagcttaacaagagagaagcaggagtttattagtgtgtgcattgggctcacacgtgggagcactcagacgtgagtaactccaagggctggtaagaccttgagctaatatagaatctcagcaaaggaacaataaatttttagagaaatgacaagacaaaggaacgaactttgagtttctagggtggcagactgtgggaaagcaaatatatgggaaacctattgtagataaagattagttagggaagtttatgtggatgcctgtggttccgtctctggactcctaagggtctagagttgtctctgatgattaacttttatccttcctagtagagaggggagggaaaacacctttgcaaatttgtgtcctgcttttaggcaaacaggggcagggcagagagcttttcttatagctgttttctctcaaaattctgtcttcacatcaaaataatcccaatgccaaagtggcgtattttggggtggcatattcggctaccctacaggacctatgcaaagatatatctttatatatatttaaaccatagttttcaacaaagttggaaacaagaataaggattgatttaaaagatattatatagccattgacatcatgctgcataaaacctatttaattctcatctaactggtagattatacaaataataacattgctttcctttggatattagcattggaaagagtgttttttgccagccttgatggtgcacccctgcagtcccagatacttgggaggctgaggtgggaggatcacttgatcccaggggttcgaggctgcagtgagctgtgattgcaccactgcattccatcctgggcaacaaagtgagacactgtcaatcaagaaagagaaaaagaaagagagagagagagagagaattctttttccttttctttcaaggaaaaatcagaaaatgagtggttgatcttagttcaattaaagaaaacaaaacaaacctgctgggtgcctcctctgctctaaatactaagcaagaaataaagtgaataagcccctgccagtcatgtaactaaactctgaatgagggaagtagctaaaatgttacacataaaagaaagctgaatgggaaaaatgcatggaaattatgagtttagggacattttcacttggccaaatgccccattctctttctctacttccaggtcattgtgataggtattttaaatgaacttgaataatcccttaggacagggttgcctgaggaaatgggggacacccagtcaaattggaatttcagataaacaacaaataatttttagcagaattgtgtcctatgcttacttatactaatatatatacatatattttatttgcctgaaattcatatttatctgcactatatctggaaacattaagaataaattgtaacatcttgtatttgtataaggcaacattttaccaatcttttcttcagaatactagttttatgaaactcagcaaaaagggctatgtggtcccaaaagttgagaaggcatttcgtgctatagctcctcttgcttacagctgttaacttggagtgataatcacctgttctgacaaccagcatagactggactccttctagctgttaacacctctgcagcaggactgagaaaggactggagagccacgtgctatggtttacacctctgagcatttgctgtgtgccagccatcacactacatgctttacatacttcatctcactaatcctcacacacttatgaggaaactactgagagtgtatgcatgaggaaatgcctcagagaggttcagcaacttgcccaaggtctcacagttgtaagggacagagtctgaatctattgcctctatacttaatcaataaagattcattatatgcattagctcatcaaaggttctaagatgtctagagtaaggaaaatttttgactttgtttaaataaccatttcctggaagcaccatcgaaaacattggtagttgcagggtgcagtggctcacacctgtaatcccagcaatttgggagaccaaggcaagaggataacttgagcccaggagttcaagccccatctggccaacatggtgaaaacccgtttctactaaaaatacaaaaactagccaggctggtggtgtgtgcctgtagtcccagctacttgggagtttgaggcaggagaattgcttgaacctgggaagcagaggttgcagtgagccgatatcatgccactgcactccagcctgggagacagagcaagactctgtctcaaaaaaaaaagaaaaataaaggtagggtgttttatatttatatctacataaatctatacattatctagatattatactatattatggaaatgtatatattatattagaattaatatttctaattatcgtatacagttatacattttattgtgttattataacatattatatataattggttctgtttttctgaagagccataaataatgcattcaatttagaagacaaactcttttagttggaatgagcctaataaaaataattaccatcccaagccaactttaggttattatttgtctctgacagtattaaattatcattatattaaattcctagaagcactatagaaatggcagcagagtatttatattatatataatataggttatattattagatattaatatattacattacaattgtattatcatgatattatatataaattggttctgtttctcttgacaaccttactaatacatccagtttagaacataaattctattagttggaatgagcctataaaaataattaccattccaaaccaactttaggttatcatttgtctttgatattattaaattattattattttaagttcctaggagcacaatagaaatgctggcagagtgtttatattaaatataatataaattatatttttagatgtaaatatattactttatgatgacattattgtgatatatatataatataatgagttctttttccctggagaaccttaactaatacatctagttcagaacataattctattagttagagccagcctaacaaaaataattaccttcccaaaccaactttagattatcatttgttttcaaggccatggttctcagccttagttgctcattaaaaatattcggggagggcaggcatgatggctcacacctgtaatccctgcactttgggagaccaaggcgggaggatctcttgagatcaggagttcaagaccagcctggccaacatggtgaaaccccgtctctactaaaaatataaaaattagccgggcgtggtggcacatgtctgtaatcccagctattttggaggctgaggcaggagaaccacttgaacctgggaggcagaggttgcagtaagccaagatcgagccactgaaaccccagcctgggtaagagagtgagaccctgtctcaaaaaaaaaaaaaaaaaaaaaaaaaaaaaaatacttggtgcacttatgaaagcctgcagagcccagaaattctgatttaattgatctaagaaaagggagaggtaaaagctcccaggaaagtctagtgcccagccaaaggccatgggagtgatgagtgaccctgcccacacctaacggagcgtcccctgctctgctagtcagtcaacagaacaccagccaatttctctaagccaagagctggttatttccaacctcccctggaagagtttacttaataccataagaagtcattttctcttccatctactgcaagaaaaaactggatattgcaattgccatcctttttgagttaaaatactctacatttttaaacaaataaataaaaaagcttaaccattttgaaattaccagtagggaagaaatcgggtgaaaaaggagaggaaccatgcattactgagaatactcctgtcccaaatctctctccatatccatttcttaaatttattcattcattttaaaaactcaacttacaattcttgaaatctttacctaggatatgtcagccagtattctagacatctggtatacatcatagaacaaaacagtcctgcccccatgaagtttcattctagcttacccctagtatatgccaggctctgaactaagtctaaaacagatgatccctgcccttccagctccctgcaaagccagcattaataataggagggctttttacagaaaatgaaactgtgacttgtttaagttacaacctgtgagtgttgaagtcagagtaccagtctttcctgtataccttaccacctatttgaaaaatgatggatagttatcttaaacggtgaagaattagtgtaagttcttaaacaaaatagtggcgatattaagatcatgcttgagaaacctaattcttgctgtctccttacatattttaagtttggcctaactctgtctctgtgcatagtgagctgtaatgtaactggatgtgtaaacagattgtagcctactcttgtgccaatctccaagttttggccaatcaaaggtggccaaccattcaaaccatgttcaagtaaggcaaacatcaagctgtaaccaacccaactatttttgtaccttgcttccattttccatatgtcacttttctttttctgttcataaattctctcctaccacgtggcatcacgggggtgctctgaacctcttctggttctggggctgatccattcatgactcattctttgctcaattaaagtctgataatttaatttgtctaaagttttccttttaacacgaccaagagtcacagattgcttagtctggagaagctactcttggctctatgcagtccacaaaaaatgacatttagaaatggttttccttccctggtctccagagaagcagcggctttcatactctgaaatgcagcatcctcatctgtaagatgcaggtgctaaatgatgactgttgttctttcaaatgttaactttctatgagtcacttcttcattgtatgtgtcaagaagcacaacctcgaaagcctgcctttgacaatgcttagaggttagaggatgccaaatgagcctcatcttctttggctactgagttagtaaccatccttcatttatctcagggagcaaaggcaggatttccgtgggtgtccaaggtccttactcacagtcaggatgcatggcagtacccttaataactacagattcagaatcacagaagacatttaccgagtatgtattttctgccaaaccctgtgccaggtgttattagaacattacttatgaaatatttggtagtgtggatgaagaggcagcttttcctgcttacacaatacagaaatatgatttcaaaaatctattaaaattttattaatctcagaaggcatgatttctaattgtgtttgatcttacacttgttatgatttaggaattcacatctgagttggttgcatgatgctatagttggcaacatgattctgaccgccaccatcacaaatagaggttagaaaatattacttatgtgaaaataaatgccatttctggcacctaaaacagctcttttctcaccttcctatgatgaggttttattgagcttttgcaggaaagaaaagaaagaaatctgcattcaggtttcaggagtaaagaggctgctcattaacaaagccgtttcaaaatctattgaaatgctccaccacgaatacatgccctattactaaaatcactgtcatttctatgcttttcttctcccttcaatcacataccacccagttttcagttcctataattgccaaaagccatttatgaatctgccttattgtatgggttacaaacgtctattttcctgctctgttcatacacatttgggagcaccttaagatgctgaaacactggcaaatgcttaatatatttcatttgaaagaattatgatctaaatcttaaagaaacagtgagtaaagtgcagtttctgctgcttggttactgtagttcattcggggaatttcatcttggtcgtgttgaatgcagtggttagatcctgtgaagttgtttaattaaaggtgttctagtagtcaaagccatgtctaaaaccccgtttgtttaattctttagtaatgtcaacattcctaaatttcatgtagcctaagagatttttccactggcttcaaatctgagctttgccactttggtgtcctttgctatgaatgttcaatgaggcgttctgagatcaccaagaatagaagagacacacccccggctgtcagaagtttaaccttggagaatgccatgaagggcaattctggaagaaaaaagagaagggaattcctcgtaggtttaagatcagaaagtggggaaggcgggggtgctcttaaatgcatcagccctactgccagcacagtggggactattaacacatcatattttttttttcctgcagttactcaaccttgcagtgggacaagttgctcaatgacttaccaggagacaattgttatttttaaaaatgtctttcttattttaactacaaggacttggcttgcttagaggctcttgctcaggagtctttaaatgcaaatgagggaaaccccaggttataaagcatctgcttctgcaggttttcaatcctgttaccttagcaacatttgcccttgtattccacgcatcaccttgacagcctgcataatataagggacggagcggagcaggggctcggggtgggagcctggaaagaaaactggggctcaaggaggtttaatatcggttagtagcttgggatccttcggataacggctgggcaatgaaaataaaaagccccatttccagaaatcaaagaacttggggagaaataaacacgctggttcaaaggaggggaaaatatatcagaactagtcggacctaagggagcagatattttccaaaaatatccttcccaccagccatgctgcagatgtgtcactgtggctcagaggcaggccatctgctgcagtgtttccctggaaacccccagcaacgcccctcccggagctcctccgcggtctcccccactccatccccgcgcagcggaggagcttgccggtgatgtcactgctgctagctgggagggaatcccaggacctgcgtccctcgggtagagccaatcatggtcggctctggatgctggaaacctggggcttttaaccagaaagaattgcaaaagcaatatgcaattcatcacagtccacaaagcacagttcctaacagattctgaaaacgtgattttaaaaaaaatgagatttatccgtaaacgagggctaggctacagttggtagggcggctgtcaattcttctacggagttttaacctacactcaatggatgcatgaaaaaaagaaatgaaatgatttttttagctactttaaaaaataaaggtaatgaatatttcttatctatatgcatatatatatatatttcattataattgttgcttctgcagaaaattgggatagaaatctcagatgagctgtagttacacggagatctacagcaatgcaatgtttagctagcatgcattttgtcatccaaggctagtaggtgaaatatttcctttacctgtcttgatgcacggtggagaaaggagacccgcttcgttttccctctaatctagagagttaacctcctccaggtagggttgaaaatatgaacagagctgcttttgcaagactgtgttgcctctaaatgtgatttaactcgcatattcagaatcttagcaaaaataaataaataaatagtaagatggggtaaggcaaatacatagatattttggagatcttatcccttattcaaggactgtagattattacagctttgttgtcatattatctctaggcagtaaatcatagtaaagtagtaaattcatagggaatgaattaatctcctttttgttttgttttctctgaaaaagagggtgtgattacagcatatattgattgggtactgattatgggacattttcattgtatttgttgttgttgcagtagactaaatgtcgagcccgtgaatctcttgtgttggcattgtcagaaaaaagttgtattttttttaaactggtctaaaaggaaaaaaattgaacatatatctttatattttttttgctctcttctcaaccatgtttagtgttttgtttatattcaaaggattttattttcacacttacaattctttacttgtctgtcattcaaatctttgttaccaaaacagtttgctctttttcatcattcactaagcattcctttcacagctaagctaaagtgtctatatggaaacatacatacacacacacacacacacacacacacacacatgcacacacactttttccaggccacagacaggaagatatgtgtaaatgtatacatgttttcagtagcatatatacacaagggtctccaataagatttttctagaaacaaaggctgatactacttcatttcatattattgtaaagtgctaattctaagtaaaagtagactaaaaaagagataaaaataaagataaaaatgagtgggctctcacaaccttgtttttttctttttgtttttcacttactctcttggctttttaactccttccttctctgcctcttatgaatgacaccaggaagagttattgtaaacaattggaatttctaaagttctgtgtaactgttagtatattcactatatgcatggtataatttataaaattaatctttgaaactgttaacccctagaaacagaaagaaagaaagaaaaaaagaaagaaacataaagaaatcttgacccactataaatcctgttttctctgccatctcccccagttacacccagggcaagtctatcttcttcaaagacattcagtcagcccacagctttttatcttttcaaacctttaatggcaccattagctacggaaccttgatttccttaatttttcccccactgtcactgcaaccatcacatgtggctctcagagcttctagttccctggaaacaggagttctatctgccatcaccaggtataaggtgccaccacttgaagggatctgccctatcaaaaatgaggaaatatattgatcaaaatggctggagaaagtgaccagccaaaacacagcttcacagtcttgcctgttttaagtagattctatttccattttgccggtgacagcactaagcaaataagcaatgttgccaatccgagaacagcctgcattcaaggtattcaatcaatcaaagagagacaatggcattctctcaaagatcagatgttttgtagtgcaactatgttgttctgtttttctttacttcaattatcagatagacaggaaaaaatacaacaaaatagcatgtagttgatttgccaaaaataaatagcaaagaaaaaacaagaataactagaaaacacgtgacaattttagaaaaaatgtaatcacatttccaattactagacaagatataaataaagagcatttataaaatgtttaaatccattcttttaaaacgataaacaacttctctaactggaaattactgtgcagctgctactttgtattttattggtataaaataactttagagttctatttcattgcattgcaaaggtgtaatactttgccataattaggtttaaatcttgcaaaaatagaaacctgcattttttggttttatattagtttttttaggtgatgctattcaatgggaggatataattgctgtttctatgaccttgggtaagtcatttaacccctctgaaccttggtttccttctttggttgaaaatagagacagtaatacttgacctctctctccagattttgatcaggttaaagaggccaataaaaatgaatgtgattttgtaaatagtgatacacacatctgatgcactgttgtgtatttttgcacctcctcagcagtgctctagctagtctgtccttgtccttgtcaactgtacgtgaacatgatgccctctagtgactgcactttgtagatgctgtaggccccaaggaagccttgagaggaaaaaagagcttaatgaagttagagaagggaagggaggcccgtagcggaaaattatgggttataaaccaataaaagcagcaggaaaaataagcagcagctgactatgagtaagaggacaagatgcacaaagagggagaagagaaaataagcagaatagagagagaggtgagatgtagctgattttggaagagttcactgtggcctggaaggagaggaacaggaatctctgcccagctttgtttataaccggcagtaggtccttccgttcatgtaagctctgccctccacaactcaccctgtgactgcaaaatgagatagttaaaattaaggttcagaattctttgagtcaatgtaagaagatgagcgaaaagtacaatgaaaatgagaactgaaggaggaagagtctgtggaagcaatttccagaatcttgtttactgtgtctaaggtcacctcagtattgcagtaacttaataacaaccaagcggctgaatgaggcaagctcaggtggggtttggtcgatcgcaggatgatcctgtactcttgtagtaacaggagtgttttgcagtacagctccacccttcacaaggatccagcccctgtgagattgcatcctcttagactgaatgcctaggagtctcactgactacctgtctgaagagctccttcttcttttctgaattaatccttctttacttagaactatctgaggatcaagtgatcttccagtgggaggatatttaaacccagcttccccttgcaaattacagatgctataatcctgtctgcattaggcttaggtcatgctttctctaaacgaactgtgtattacaggaaagtaatcaaagtccacaagaactgtgtaattaaaccagtgatggtgcaaataatccagaagtctgtcattgctctctctagacaaaggatcactcaaagatgagaatttgaactaattttactgaaagacaggatgatgcagctgaatggaaagaacactgcataggggtcagaaggtgtggattttcattctgacatggacatttgctatctgcctgatcttctgcaatattctaaacttaacaaagccttatctatacaatgggaattaatccatttattcatatatattaaagattttcaatgtgccaggcactgtgttaaacttccagatggcagtgagaaacaaactctagaatttctgagtcatgataaagatgaaacaggtgttatattttaaaactcgaaatgtcataacagtgtaaggtactatgcattcctaaagcaacataaaacaatagggatttttccaaccttaaagagcagcatttaaaattgagtcttgccttgggagcctgtgacccacgggagcattggaaatgacatcaaccacgaagtcttttttcttccagtgaaatgcaaaacctgctacctccctggagctattagcttggccaaatagtcctctagttagtaagtggacaaagtagttactgcacggctaactgcaactcttcatttaaatatttccctcatgtccagataggatatgtctaatatcatatgcctaatagcttttcagcatctttccacacagaaagaaagggaaataagccttgtcatagccatgaagtgtccccaccaccagagtttcttctctgctacccctatgctgcctaggaatgctaaaactattttatggggccaccaggtggcagttagggcaaatggttttagtttttttctttctacattcttggggaagaccaggggcttaggaatggagaagcaagccttggaaataaaagcattatggagcatttgggggtgccaggccctgtgctatatgtgatatatgcaatacctcacccaatccttatatcaatatctgttaaatatactattgaacaggtgaagatagagtaatatgggaaataaaacatcttccgtaataagcagctagaaagtaccacaatgtaaattcaactgcagaagacatgacaccacagggaaatttcgtttcactgcagcagtgtctaaaaactgaagatggggaaagtgtagagtgtgttattaaaatgattttttcaaaaggttttaagagtctaaataaattgcataattagtcagtttcctacctcctagtcttcctacctttagtctttatttttagctctcctgagtttgtagttgttctccttccatggtttgattctctccttagctttcagattctatacatttcacttctctttataaataatttttaaaaattcttcatgtgaacctgttcaagaacctgttgcattgaggactgaagatatggctctagattccttactgtttccggtagagaatctgcagagagaatatttcactgaagcaaaattataaatggaacatttgactttatatttccatgtccccaaagatttactaaacattagatctgatttggccaactttttctaccaatatttccggctcttgatatgaaactagttaaagctattttttcccttcaatcagcacattttcaaacttagaacatctattactcaaatttggcataaaattatgcagccagctcattatccactttctgcatattgccaagggctcgctacgtatgtgtgttctggttggcagacattttgggtaactactattctcaatttgtacctactttatttcaatacatgtttcaagatgagtgttaaagggtacattgctttaggaaacttgtctttttctggcatttgaacttgcctaaattagaaaaaaaaattctggttccagtcctttttttctaaaaaaatattccaaatcattagatgaaactgttaaagataacgtttggaaagtttgtctcctctttggtgattaaaaagtgctttccatttttggcccatggctcttttcctggggcatagcatttgattataaagcttttctgatgaaagtatcacaggacagcaaacatgagaatgggagaaataattttgcatgcaattttttgtcatctggctgcactgtatgggaaatacattttccctgtcaaaatgtcaagttgttttgacttcacaacaaaagaggaaggaagttcttaaatgtagaacaataactcagctcactgctgatttctatttgttctatccttacatcacagtatagagatagaatgtgtcctacaaatgtccatgcagcaactcatattcacttggcataattttgtttattgtttgagaaagtagtattttgggtaaaaattctgaaacaggcagtgagtatgtctgagtatttctggcaagggctatttcttcctttctccttttactctggagttttcttgaactgagctgtttggacaaatgacacatatttcaagaattccaactgtgggagtgtttcactcacaggattgtgctttcttctaagagccaggtctggtgaacactctcaggagctttgtaacatgttccaagctatgcagaagtgcttagttcattcactagtcaaagactaacacatttacagcaataaaatgcattataagcattctttcttcatgaatctattcatcccattaaaaaagcaggaattccaattaagtgaggtaaaatatgctaagtagtacagtataagatttttaaaaattacaccatgtttttcatggattattttaagaaaaaaactattttaagaaaaaactgtcctatttttggaaggtctagtcccaaactgcacaggaaagttagaggtaaactgttaaagtctttgagaactggcatttttcaagccgcagtgaatgaaatcaagcatttctctgtttctcctttcctttcggaatttcttttcctgaggcttgagaaggcaatactggtcttacttttcacatgagtcaagtttatactagctgagcaccctgaatcattaacgtctttctccccaggggagaccaagctcaaatccatcatcagaatacatacttagaccctctcccttctttctggccccctgcttcttaggaatgtgctctaaccaccacagcattcctgatcaccacctccagatgacaaaaagaaaaaatgagtggcagtgaaccagaagagcttaggccatctattttatcctaaaatctgttcagaaatacgaggtttgtatcaattagtaagcacactgggaatacaggtatacaagttgttagcaatatttggttatataatgtctatagatatttattttgctttctctcagatattaagaattatgtctttcctttaacctccatcatttgtttttctactttggtggaagctttttgtttgtttctttactgcaacagtgaatttatccttggatttctccattatgattggcagtatttatacaataatttcttggtattagttaattgataccttatatttactattttcccccaaagctgagtaaagaatagaatgaaatggcctatacttatcagtgtaaatggatattagaattgctgctcttattccaaaaaatatcacttaaagttcacaaatgaaagttaataactgaattttagtaacaacaacttcaacttaaaaaattccatgtaattaatagctcatgagtcccactgagataggttgaacttcataacttctaaagccttttatgtttctactacttttcagttctaatgttcaatagtagcgtgagtatctggttagtttcagtataaaaaagatgatacccacttgtgatatgattctactttcaatgtcacggtggaatcatttattagttttttaatttaatttttcacatgtgagtgtgatacagaacacctgatttttctacactataggatgtcagttcagtaaatcgattttcctcattagcaactgcttatcaatgactatgctgtatagaaagcaagagtattatactctatttttgatcacagataattgaagtaaatttaattagatccatatgaaagaaataagaactctcacaattgtgacatatatacgtgtctgtgcatatgtcatatcttagtatatgaggtatttgcatgtgcatacttaccaagttaaacgacctcctatcccacaaagttctctttagaaataaacttgagtctcttgtttgtgaaaccaaagagaatttcccgccaaagaaatacctacaaagaagtgtaggtaaagaattcaaatgattgactcaggcttaagatgatttgatagctctttctgcaccaagaaacacagaaaatctcaaagcaggcctgtgccaacttggtataaaaaaagccttcctaaagagtgcattatcttcaatgggaaacgtcgcagtacaccttggcatcaccaggtcaattagtgcaccggaaagatgcatgatatttcctgttggcagccacgaagtgagagaattggacggctactagccctgttgtgtgccaaggcctaaaaatcatgcaaggaggtgaaatgatgcgtgccaagaaaatagcaaccacaggaaacagcaaataatgtaaggttttgtgtctttactctagatgtaaatactcatttaccagggcagctttaaattgacagcttttgggtttgtgaggatattgtgagtcagggttctcctgattgggcaagatgaacgagtgaacaacatcactagggggccggagtagatgagatactcactcattcgtgtgcctgctttagcaccagcagtgtgggaatggggagaaggccaatggtctcaaggcagtttccagctctctggcaaacaagataaggccatggctgtaacagacaccctctgccaggttctaaaatctctctcttatgacctttttaagatctttaaagcaccgtctgcccttggccaacaaaagagaaaaaacagagtcaatgcggaaaacgctgccaagacaacattttcttcttaagatcctaaaagcaccattttccctttgctaacaagacaggagcaataaagagtcaattaggaatatgttgccaagacattggccatataatttctactccagtcggttttgggtttgatgcagtttagaattctctagacacattttttcatttttttttcttactagaacgcagaatgtttttgagagtagaggtggatggcactgctcattagaaatagctgtcctgccccagaacaatcttcaagacaaaggttgcaagactatctttgaccttcctgtccctaaacactccccaaccccaagccaaacacgcgcctaaaagttttcacaccttgccctttactaacagcaatcatatttaggaggaatatattattgttagtcaggaaattctacctggcttcaggaggtagcttagtgggtatttgctaagtctgatacctttcctttcaacatttagctgagattacctatactaagagcacgaactacaactgtggaaaacagaagaaaggagaatgttctccaaatcaaagtgtgctaaggtcagcttggggcagccaacaattcctggaaggtgacagagataaagttgcagagagggaaatggttgaagacaaatgtctcacgccttaaaatgttgctaaagtaagatggctgtttggatgagtcatcaacaagaacatcacctttgctctcttcctgccacccctgcacttctcaggctactgctcctaaaacctagaactcaggagtgatggaaatagagggcacccatggcaaggaagaaattggagagtaggaaactcagggaagttaatcctgaggaaagtggaaagtgactaaaacattttgagcagagaaaagtcaataaatcaaatatagaaacaagagatgataggaggttctcataacagtccaaatgagaggaccaaaaggcctggagtcacgtcattgcagtaaaatggaagaaaaaacaagagtataaatgaagtgtcaaagatgttaagaaacaggatcttttaaaaaattatttttaattattatgggtacataataagtgtatatatacatggggtacatgtgaaattttgatacatacaatgtataataatcttatcggggcaattggggtgtccatcacctcaggcatttatcatgtcttatattagaaacagtccaattctcctcttttagctatttgaaaatatacaataaattattgttgagtatcatcactctgttgtgctatcaaatactagatcttattctttctatctaactatgcttttgcacccattaaccatccccaccttctccccatgctggctatccttcctagcctctggaaaccatcattctattatctatctccatgaattcactaggagaaataggatttttgactaatgggtcagaagaagcaaaggaaaggaaaggaaaggaataaagaatgactcaggtttcttgcctaggaaattggttaaaaaaagggtatttttaattaaaaaaggagagttgaataggagactaatttgaaggagaaaatagcctatttttagatgtattaaatttatcaaatttgtgtgctgtatatcagggctcaatcacaattctggcataaatttatatattttatagaacattattaacttgaaagaaatgcatgtattttgttaattgatagaaacaagatcaaagggcatattatattattattccgctttgtaaggaaaaataggttttgcatatttatataaaaagggaaattgaatgtgatatactctggggtattaataataattgtgaattaaattcctttctttagtttatattgctgtctcaaatcttctgatttttctaccttgaatgtaaattttttgtttgtaatatggcactttaaattaaagttgtttttcagctgggcacagtggctcacacctgtaatcctagcactttgggagaccaaggtgggtggattacctgaggtcaggagttcaagaccagcctgaccaatatggtaaactccttctctactaaaaatacaagcaaattagctgagtgtggtggcatgcgcctgcagtctcagcaactcgggaggctgagacagaattgaattcgagaggcggaggctgcagtgagccgagatcataccactgccctccagcctgggcaacagatcaggactccatctcaaaaaaaaaaaaaaaattaaattaaagttatttttcttttcttccattacccagactggagtgcagtggcatgatcacagctcactgcagcctcaacctcccaggctcaagtaatcctcccacctcagctttccaagtaactaggactacagatgcacatcaccatgcctggttaatttttgtaatttttgtagagatgaggttttgccatgttgcccaagttggtctcaaactcctgacctcaagtgatcctcccacctcagcctcccaaagtgctgggattacaggtgtgagccactgcactaggccttaaaatttatttttcaaaaacttgatgattcaaatcattgaagatgctcttatgccaaagaaaaggtagttctaggaagttcatggaatcttacaaacacctttacagctcaacagaattgcaaagatgggtagtgttttgttttgttttgtttctctgattgttctacagcttatagatactgaggttacattttatgaaacaaaagtaagaatacatgatttaaaagtaagatcaattcctaaaaattggacctgaaaattttatggatagagtagatagacgtgtagaattcatcccagcatagagttgctgggatattactggtgcttcttcacagggaaagaaacctggctacccagactacaaagggaaagggggaaaatggcctataactcatatcaggtgaattagcaaacattctcatttcagacgatttttgctgtccctggtcatgaaatttccttaactgggttctatcttttactttttatcccaggcttttagcaagggtcataggaaaatggccatttccacatatctggtatatcccatttgaagatattgcctaacaaacattactcaggatcccttacataaaaacctccatgataaatttcttctgtacttttttccccaaaaagctggattctcctgtaaaactgttatctattctctttatatattataattatggaattcattatcatttctactcttatctacatgactaggtcaccaacagctaattatatagctaattcatggtagttaattttatttacttctcttaagtcatgacttacaaaattgcatttctatgtatgccatcttattacctccatttatttaagttgcatactacttcacatttcctttgaagtgtatattattattagtagtagtagtattttggagacagggtctcactctgttgcccatgctggagtgcagtggtgcaattatggctcactgcagcctcaaccttccaggctcaagctgttcacctacttcagcctccccagtagctgggactacaggtgtgtgccaccatgcttggctaattttttaaaaatttcctatttcttgtagagatagagtcttactatattgcctaggctggtcttgaactcctggacacaagcaatcctcccacctcctcctcccaaaatgttatagacgtgagctaccacacccagccatgagtgtacattataaataaataccaataatgtactttcacatatgaaaaggctataaaagtatgcaaatatattatggcaacatctgttaagggataaagtgacacactgttgctcataactcgaaagaatatatatatatatatatatatatatatttttttttttttttcttttgaaacggtgtctcactctgtcaccaggctggagtgcagtggtgcgatctcagatcactgcaacctccgcctcctgggttcaagtgattctcctgcctcagcctcctgagtagctgggactacaggcatgagccaacatgcccagctaattttcatatttttagtagagatagggtttcaccatgttggccaggttggcctcgatctcttgatctcgtgatccacccccccatcagcctcccaaagtgctgggattacaggtgtgagccattgcatccagcctcaaaagaatagtataaaccttatgtgttcatataagcagtagaacctatccctaatagttggattttattgtgtaagtgtttcattaaggaatgtctgaaacatgtccagatttttatttcagtggcttagttttgccacagaacttcagttttataaatgtgtgtactggcttaactgtgaaagtattaaaattattgtattgatttttgcttgcaaatgaaattcataaacagaattatcactgaaatttacatgcaagagaaattgatcaagatgatttgaaaacttatggaaagattgaaggttgccaaaatctttctctttctaacttcctacctttatgtacatttacactctaatcacaggtatttacaggccttaattttaacgaaaatgaagaaaaccaagaaagaaacagctctttagagcaatggaaaatcttctatgatttctcactgacattggctagatactctgcatttatgagcaatcatgcatgtatatcatcagatttaaccttcacaacaattccatatatattatcagatttaatcctcataatagtttgctatcctaggttttagtttagaaaactgagcctcccataagctaagaagttacttgtccaatatcacaactttagataatggtagacttagattaaatccatatttgctcgctctacattccatattcttcccatttaattgaacaagattttggaataaagttgaaatccacaaaaggaataggacagtgacttcacaataaaaatattaaatgtggcagaaagtatggatgtcaatggaatgtaaattctgggcctcctcaaaaacttgatatactcatcctgtgttagttgtgaaataaacaggttggagagtgaggaaatgtggtttttgttcccagagtcattactgaccaactgtgtgctttgatattatatttgctttctgatactaattatattaattctcgctcatagaaatcttccctccttcataccccacctctgtttgattcttaatctcatacataagaggtttttattcaatgtctcatttttctttccaggacaagtatgttgtaagaattaattaatagtcttagaaccattcaagcagtaggttctaattgagtatttttctccccggttagcacagcaccctgtcagagccctcaaagtcagacaaagaaggatgaaacatgttttggtccttaataaagaactgctgattgactgtttgaaaaacaaatgccgcacacctgtaatcccagtgctttgggaggccaaggcaggaggattgcttgagcctaggagtttgagaccagcctgggcaatatgatgaaacctaatctctacaaaaaaaaaaaaaaaaaaaaaaaaaaaagagccgggcatgaacctgtagtttcagctacttgggagactgaggtgggaggatcgcttgaaccctagaggcagagttacattgagctgagattatgccattgcactctaccctagggtgcaagattctgtctccaaaaaatgaaaaacagctgtatggtttggagagccagtggctgacaaactgaaggtcatggctaacagagtctccatatcagtgaatctcaaacatctgtttacataaatagcatcttcttataaaaaaatacaaattctgagcccccatcccattatagttggtaagtctaggatgagaccagaaggggtcattttaatgagattttcagatgactttgaatttatatttaatatttattctggtttgcctggggttgaagggttccccagggcatgagactttcagtcttaggcaaactggaatagttggtcactcagatttcggtgcagtggttaaagttaacactttcaaaaatattgtagtgatctagatttggttctaggagtttggctcaattcagggctaacaaaaaaatctgtttagggccacttggggattagtgattctcaaaaggtagtccttgaatcacttactgaatacctatagttgaagaacagataactgcattttaacaagattcaaaggcaaattaatgtttgatgaccgttgacatcaagtctcagaatcagaactgttcaacttccaagcaaatgaaattactaaactcacttctctgagtgaggctgagagcaagaagttaagtataatgttttttgagctaaaatacagagtctactatcagaatcctgtttcccaccataaggattaagatttttttgtttttgtgtgtgtatgtgtgtgtgtgtgtgtgaatgtgtgtgtgtgtgtttgttttttgtttttctgaagtgaatgacatcgttttttggaatgaaaaggtcttgccccaccctgcaagtgtatctctgcctttgagacaatttagccctggaatcaaacctgggggggaaaatcaaattatgatattaaagaaaacgctgacaaatttctaaattcctttcctctactccctgctgcatacaacttccttctttctatctataaatactatatctgctctagaaacgtgaaaaataacataaatattgaacagagtgtgaaggaatttaaactttattgatgagtagtagtattacccttctggactgatgcagatgagagcaccataaagacaaagtgagttcttttggtccttaagccatgaattggagtctggatagtagggatggaaatgggttattagatcatcagttcactttcctctccaagcagcaattaaatttgttttctttgtctcagcttactcgttgctcaaaaaaaagaaacatttcagctcctcttcatggggaataagaccaaacatagaacacttttctcttaacatgtgtggtgcttgagaggagaaagaggcaggaaggaaatgcaggagaaatgtgggaatcacagttaacctgaaggattactttggctgtccccttcagctaatgtgaacattctggcagtcagatgcagccctgtgagaaacatctatcagacatcctaagtagatgctccaactgctgtttttcatgtacagctgactccaagatgagtgtgatgctatcacggtgcaggataacagagatgtaccgcgaacccaacactcaagatgggaatgataaaacttcaataacaaaaacaaaaaaacaaaacaagccacactatcctttcagccttcagggatcgcctccttaaactgttttctaaaatctttctgcactttatatcaggtgcaggagaagtagactacatacattatttgttgtctatctttgaaaggatttcattccctctactgcacttaatcattcccttatctgaatattaactcagtgtaaagcttcccaaattttccaagttcttgaaagagagcaaaacatattgcaaagctctatatgtttcctgctagatatatttcgtgaaagacttcattatgtccactttcttttgagtttttgtgttagccctgcattgctataatttccaacatcccctggaacataatgaaaaccagagaattgctttttttttctgggtccattttattacattcttttacatctcttacttaactacttctaatgcctttgctctgaaactttgtgcatttgagggtttttttttccccgtgatttggtggactgcaagggcacacaaaactagcttatttttcctagtcaggcagttttgaatagaaggtgattgtgttttccagagataagtatgtaagtcttttctgctaccggaggaggattctattttagtagtctattaagtagacaataagcgctgagttatgagttgataagtggatctgcttaccacctagaaacatcaattgaaaccacagcttatggtttcttactgcctctttttggtttctcactgagtctttctggttattgttatcatttcgtttttgacttgggcttggactgttcagcttggctgtgttaatttttcagaatcaatgacttttatagttacttccatgagtttttcctcctgcattttatttaagcaattcactaactatttataagaccatctttgaaagcctgagatacatatctaggcaaatatccatggaaaaaataaacactctgcaaatttgcaaacaaatacagcaattgccaaagtagggttatcttttgcaatcagtactgtggtttcagtttgaaaaaataaagctttcttgtcagttttgctccaagggctatctgattcggtgtgtagtcggtgaggaaataaatacaggtataataatctgtgcttgctcaaaaattaaaaaatcctttaggagggggccaggcgtggtggctcatgcctgtaatcccagcaatttgggaagcagaggcagacagtttacctgaggtcaggagttcttgagaccagcctggccaaaatggtgaaaccctgtctctactaaaaatcttagctgggcttggtgacatgcacctatagtcccagctacttgggaggctggggcaggagaatcgcttgaacatggcggagattgcagtgagccaagattgtccagcctggacaatagagactctttctcaaaaagaaaaaaaaaaaaaaacctttaggaaggataaaactcatttcctctatcagcatagtgtcaccatattacagaagtatcaaggtcaagtattaagactactgaggctcaggtgtccttggctgaagggagagagaggataccattcttgcatagtcttcagggcagcagtaatcagcaaactgataggttgcttctgggtctaaacccactgtaatcatttgcttgtagagatgacaaagttatcagttgtacttacatccactttttttgttgtttcagaagcttaccacacttctcccagtttccttttaattagtttgtaattttaaatcattacattaagataagaggtttttattaaatttggtagaactcatggtaggtcctacagaaatcactgaacttggcagccaaaaacagtgaccaggctgaggatgtgcctgaattgaacagggagatgctatttacttcttaacagagacatacttttcacgcagaaacttggcaactggaggagaaaaacacagaggtgaaggggaaagaagactattctggaaattaacaggtttcaattttggttgttcttcaacttgttagctatgtggccagaaataagcctcttaaactctctattccttggtttcttcacccactactctaaatctgatgaaacagagcagtaagaatttcttaggatatagcttaatttatttttttttaaaaagctcaatctaaaaacaagcttaatttaaaacagagacaaacaaatatgcctaactttgagttttgacaaaaaatgcaaaagtaattcaatggaggaaagatgagctttaaaaaaaaaaaagtgatactggagcaattggatatccaaaggcaaaaaaaaaaagtgcctaaattcatttctcacatcttatacagaaattaactcaaaattgattacagacttaaacataaaatgttaagcaataaaactttaggaaacaaacaggagaaaatgatgaggacctaaagctaggtgaagaacttctagacttgatactaaaagtatgattttcattttaaatgaattttaaaatgaatttcaatgaattttaaaattcattttaatcaactgggacctcatcaaaattaaaacttttgttctgtaagagaccctgtgtaaagaattaaaagaaacactacagagcaggagaaaacatttgccaaccacatattcaagaaagattttgtacctagagagtataaagaactctcaaaactccacagtaaaatccaaacgatccaattaggaaaatgggcaagaaacataaacagaaattttaccaaagatgatatacagatggaaaataagcacatgaaaagatgttcaatatcattagccattaggaatatgcaaattaaaacaatgagatagcactatctacctatcaggatggctaaagtaaaaaagagtaataataccaattgctggagaggatgtggagaaactggatcactcatacattgttgatggaaatgtaaaatggtacactctgtaaacaatttgcttgcttcttataaaactaaacatgtatttaccatatgattcagcagttgtgctcttggacatttatcccagagaagtaaaaacttagactcagtaaaaacctgtacatgaatattaatagctgttttatttgtaaaagccccaaactggaaacaacccaaatatccttagatcagtgactggttaaacaaactgtagcacagctatactatgacatactatgaagcaataaaaaaggaatgagctattgatacagacaaaaccatggatgaatttcaagggaattgtgctaactaaaaataagccaatcacaaaagatttcatgtgatgtgattttatttatataatattcttgaaatgacaaaaatatagaaatggagaacagattagtagtttccaggggtcagagagtagaggagggagggaggtgtgtgtgtccataaaaacgttgcgccagggatcctggtgaggaagctattctgtatcctcattgctggtgttcacgtgaatctacatatgtgataacatttgatggaaccaaatacacacacaaacacacacatacacatatgagtgcatataagaccagagaaacttattttggtggattccgtaaatgtcaaatctttggttatgatattgaagtgtagtttggcaagatgttactattggggaaaatagtaacattgtactattgtcctgtgaattattgattcacaggaaattgtaaaaaaaaatgctttgtcctatacatttttttagaatttcctgtcaatccataattatttcaagataaaaaaagttttgtaaaggaagaattttagagactctttcagattttttattttgagatttaatcaattatatgagaaaaataagctttaactgaccactctttccttcctatccaaagcttagtcaatgagaaaatgttgcaagagaaggagaatggggggtacctgagactccaggagagtacataccctttttaaaaaagcaatacaagccagcagaaaaaggaaagatgggactctggagcgattatgtgaatctgtggttctcaaagttcagcatgcatcagattcccagagggcttgtttaaacaaaaatttctgccctgcaaccacagagtttctgattcactaggtctgggggtggtgggtgtggttcaagaatctgcatttctagaaagttcccatgtgatgttgactccagtgctgatgctgctggtcagaccacactctggaaactactgccatagaacatctgagagtcacaatttgaaactgtctcaagaaatttctaagtaaaatgcaatgcaataaattacttaagaattctctatatttacaactctttatttgtatagtttccttccccctcagtatgttggctggtaagaatgttctttttgattattcatctgtgtgggctcaagagtgtgtcactgagttaatttacaaagcctcggattgcatatccatcacatttgtagaaagtattatcccagaaaaatccatcaacacaacacataagctccaaaatgtactgcacaattggcgtgcaatagagtagtcaaagaaccaatgaaatgcaaaaagttatctatatggagatctcaaaatgaattaacaaattaaatcctttgacattgtatgagatcccattagggttcattgttacagttttctttaatgtttctaaaatagaaatgttgtcctgggcagagcagtgtaatgtacttgctttggcatcaaatgccacattttttttttttttgagacggcgtcttgctctgtcacctaggctggagtgagtgtgcagtggtgcaatcgtagctcactgtagcctcgaactcctgggcttaagcaatcctcccacctcagcctcctgagtagctgggactacaggtcccaggtgcccagctatttttaaaattttttgtagagacaagtcttgctatgttgcccaggctgatcttaaactcctagcctcaagaaatccttcagacttgtcctcctagagtgttgggattacaggtgtgagcctccacaccaggcattgtttctattttaactttgctacttacgagaagtcttaatttgaccaacaactaatgtaagctctagtttccccatatgtaaaaagaagataatgcctaaattgcagggtttattgggagaattaataagaacacgcctaggccaggcacaatggctcatgcctgtaatcccagcactttgggaggccaaggcagctggatcatgaggtcaggagttcgagaccaccctgaccaacgtggtgaaaccctgtctctactaaaaatacaaaaattaggggagtgtggtggtgggcgcctataatcccagctactcaggaggcttaggcaggagaatcacttgaacccgggaggcggaggttgcagtgagccgagatcgtgcaattgcactccagacttggcaacagagcaagactccatctcaaaaagaaaaaagaaaaagaaaaataagaacacgtctaaaataattagtgcagtgtctgacacttaagttctcaaatagtggcggtgaagatgtgaaggagggtagagatgactgtgattattaatcatcttatttgttgatcatattaaaatgacaaaaaccacaattattttgcaccaacctaatatttcagcagatgtcctctgaatcagaagtaaatagccatgataatcttaccattagttattttattgagcaattacaagtcccaggctcttacgtttttatattaattttttacaaccagtttatgcgatgcatactgtcctcatttatcatataaggaaactaaaacttaaagagtttaatatattgctcaaggttatccagtgtattggtttgctagggctctgtaacaaagtaccacaaaccaggtggctcaaacaacagaaatgcattgtttcacagttctggcgtcaaaaagtccaaaatcacagtgttggcagctttggttccttctgagggctgcaagggaaagattgttctgggtccttctccttggcttgtagatgtctgtcttctccctgtgtctctccatgtcattttttcctctatgcatgtctgtctctgtgtccaaatttttccattttaaaaggacattagtcattgctgggcacaatggctcacacctgcaatcccagcactttgggaggctgagagaggcagatcacttgaggccaggagttcgagacgagcctggccaacatggtgaaacgtgtctctgcaaaataatacaaaaattagctaggtatggtggtgcatgcctatagttccagctatttctactcaggaggctgaggcatgagaattgcttgaacccaggaggcagacgttgcagtgagctgagatcatgccactgcactccaacctgggtgacagagtaagactctgtctcaaaagaaaaaaaaaaaaaaagggcattagtcattggattagggcccaccctatggaactcattttaacttgatgagctctgtaaagaccctatctctaaattatatcacattctgaggtgctgggaggtaacactccaacttatctttattgaggggggcagaattcaaatccatagcacatagtagtaagatgtcatgctgaggtatgaaccagacttcatacgcaatgctgtggactaaacttttgtatgcctgtgaaattcatatcttgaaggcctaatctctactgtgacggtgtttgagatggggcgtctgtgaggctttaataggtttagatgaggtcaggagagtgaagtgcttgtgttggaattagcacccttataagaagaaaaaaaggccaaagcctcctctctctctgccacctgaaaatgcaacagggaatggccatccacatgccaagaaatgggcccttatcatacaccaagtcttcctgcacattgatcctcgatttctcaggttttggaactgcaggaaatcgacgttcattgtttaagccacgcagtctatggtattttgttatagctgcctgagctgactaagacaggcaatatatgacatggccgtttgctccaggacttttaggaaatgtggatcccattggtagtgctcagcaatcaaatttatttgatcctcatgttcagcagacatgttgtttttttcttcatgtattgccaactcttttatatgatacataaaacatattgaaaaacgtagacttgctatctttatattccacatgttggcagattctttccaagaaaagtgattttcagatcattccttaggagcgttgaggctgagaagtggtctttgcatatttatatttagaaattatcgagtccaaaatctaaatattgagtcttggtagaagagaaaaccagtcacaatttatgtaaaatagttgttcctaggtaatgaaccaaagcagggactatatttgagaagtagaatggtattgtcaaagtcagtgtacaatcaggaaattaaagagattattttatccaaactattgcagttaatgaggaatgtctcaaaagaaagggaagcagggttttatagatataggggaacaaaaagtttaagggatttcttaaccaccacttttttctagaagcatagggattaggtcacattcaacattttcagtccccacttctacttcagatcaataaacattataggatgctgaacaacatagaggtgatcatcagaaacctgagtaagactgagcagggtctaagaaatagtctctcaagagttcttgttggcattattgtcgtaacatcacctaaaccagctgttgagaagtagtggcaaaggccagttgtttcaaagtcatagagatcaggctccttaaaagagaagtatttaaaatgaaaaacattaatatcaaagattatgttaaagaccagagtttaaccctgagcataccagtccagcaaattccaaaaggtgggtggggaaaatctttcagttacacagtaccgttcgttgagtttcttgaagctaggatgtcaatgttcttgatgatgttcagtctcggttagctttcctctaagagaatgaaggacctgagcttttcaccagaatttgttaggggctcagacagtggtttgtgcagggaaaagtctggcctgcgtgtaatctgctgcagtggtgagttcttcaaagtttgaatcaagtagttggacttcagctggcagaatttcttcaactcctggagaaaagagctagctgctagacaacctagagttccaacaggaatctgggcaatcagatgttatttttcagtgacatcaagttagggaaagagagaaaaattggaaacattaatttgtagggttgtagccagatattgaagcaaactggaaggcttcacagtttggtacaaattaacaatttgggcaagataacaggatccagttcaatttttaggaaggtgtccaaactgctttttccacaaaggaggggaagtcatttaaatcattccagacaagtcagaatttgcatatgtatcagttacctgcaatttatgaaactgtataatatggctaagagataattatgtctacaatctgataaacaggaaggagctgcttgctatagttttccactgaaacaaaacatttctctctatagtcacccctcttttgatcaaaaataatctcaaagaaagattattcttgatcacaaaataaagctagtaccatcagatttggcctgattatttacattgttgtcttaaagatgataattcactacatagggtttcttatatttgctttgctgaaagttttcataaggaatctcaaattgaatttttaaaaaccacttgaggctaggaagctatatcaagaactcaccaacagatttacctacagtatctataaatttcagtaaatgcctctcttttagaggtcccaaaaatatctcaagttttctgagcctgcgaggaagtatcctttacctgtaaatttgggcacctcattagccaggaatcaggctgattttcccaagagggctttaaatgagcatacctaatgtttccaatatttcatgcaaacaaggaagagttttattgaacctatgcaaataactataattttgaaatataatgagaatactcagtaagaatttctgatttctctaacagtcaggcaggaagaaaaagataccaatgacaaatgtttcatttatatttgcaaagcatagacttctgaattgttatgagtttcagttagtttaagagaaaatagaaagaagtttcctatgtccaaaaaatcaaccattaaaatatcagcaatattccaaacaaaagctacagtcattcctcatcagttccttcagtcctgtgtaattcttgctctgcttcctcttggcttaacagtttcatgcatacatctgcctctccaaacagggctctggaaatcctgactcagtctgctggtatggtctcaaggttgtgtaagtgacggcatcagaagcttctgccccaaatgaaaagtacctggcatagagctttgccatggggctctgagataatcctttgttaagacaaagcactacagctagatttgtaagagctttcagggaagcaccacaaagcaaaattctatttgtaaatgacaaaagccttaaaaattactttgaaaaatcattttcaaacgtgaaagatgtaaggagtgtttatcacaagaatctccatttgaaaaatactggcttataggcacagaaaaacaaagatagtatgttctcacttacatgaggaatcttaaaataatcacactcgaagcagatagaatggcggttacaggggatgggggtggagggaatggggaggtgatggtcaaaggctataaaatctttattaggaggaatctgtttttgttttttgagttctagtgtacagtgtggtaagtgtagttaataataaagtgttgtacatttcaaaattgggaagagtaaatttcaaatgttctcacacaacaaaatgactagtatttgaagtgatgtcgttaactggctcaatttaattattccacatggtaggcataaatcatattatcactttgtaccccatatacttacaatatcataaattgtcaatttacagtttttttttaaaaaaaaggaaagcactggcttagaagaagctaatttgaaattaacgaataaaagttgttaccaagttaacattttaaaaataactgaaacttatgactcatgtggtgctctctaataacagggcaaagtgacatcgggactcaaagaaaaacacgttatggacataaaagcctttgatgactctctaggaattttccatacagcatacaatttctgaaatatttatactgataacattctgcccatacagatttgtcctagggaaggttaagcatctcttctgagttggcaatgactcccgtgcaatttgtaaatagtaacatatcaaataaacctaattcttttcagcaactttcttttcataaggtgaaataacaaatcctttgtgattttcaaaggccctctgggagatatcaaagacagtttcagatgcaatagatatcacttaggaatcagttttgggagggaaaatatcaaaagttgtcaggagattgggacactttactaggatacggtcgtgagttactgataaacaatactttgctaccttaactaaggtgacagcaaaaagagtgaaaaagtaagcacaggcagtaacatgattgtaaagaatcttagctttttcaaaagggagaagactttattaaataagcaaggacgtgataaactcaatacacaatataggaagttattttaagacatggaatctttgccttctaggcagattactcagaaggtaaagaaaaaatattattaagagtagactaagaagtcaagaaaatgttatgtttttaaacagaggcaaaattaaattctactttgcatcattatggcatttgatattaaagatctttttgaaatcttataaatgaattcatcaagccttagctagcactgaccacagcaaagtttgtttcccacaagcgttttacaactttctacgtctattcagcttttgtcctacacattaacaactagctatatgacttcagaataaaatgactctatttttttcttaacaaaaacatgttctgcaaaccttgcatacaaaattgtatctctctgctattattatgccttgtagaatctcattcatgtatattgattataatttttaaatagaaatagtaacatctgttgcacaaagaaaaaagggaaatggataattgtgatctttctgtcatacataagctttttgtaacacactagtggaactcatgaatacacatctcacaacttttaatagccatgcatattatttacagcacgacttatgcaaagtggcaaaaatgaacacatttattaacaaaactgaatgtacatgcttctctatagcatatagaaacaaaaggcaaaaaagtatataaacttaaaattatgcttggttaccaatatttcacttttctctcttgcatagaaattacataaatatccaattaatattcattaattaattcaatttagcttcaatccaaggttttaaattaccaaatatcttggaatttgtcttcaggctgacatgctccaaaatattagtaccattgaaagtttgttagaataatgactcaatttgcttaaacacaaatttttattttctattgtattaaacattaagtagaagtaatgctaggttatttggttggtaaatctaagtttaggaagaacattcacaagtagaatagaagcatacttgtgttatatttaacactaaaaactcagagaaaacagctatttttactaaatcaacctcattaattgattatcaaaataataattattgttaaatattgtttgccaaacatttacctagattttgtgaacttgaattattgtctctgagttatgttcctacaagagacagctttttcccctacagtaaaagtgtttaaggctcaatttcctcaacttctgggaatttgggaaatatttggtttatataaatggttatttatttctaagccaattagaatagagctcctttaagagattctataacctaatttagcgacaccatcctgaggtagggaaatattttatttttatttttttcagagatgggctagattagaactcctgccttcagcctcctgagtagctaaggttgcaacttccatagtagctgaaattgtaggtgcatgccaccgtatctggccaacagggaaatattacatactctaacaatgagtggtgacttcctttctgaattacagacatgtagacattaaagcagagatagcaagaatttagtttccattctaacatttaagccatgggtcaagagtggacacagaatcacaaaacttactgtttcatatcaaagagctgttctgttctcatgattcttaagtgatttgagctcaaaacagacaaacagaaaagcgtagcaaaccaaattctctgttgtctttcacccataagatacaagatctctaaaagtcattaatcccctctcagagatcaccaagtggtcagaccacaaaaccaaagccagtgccagaaatcaagtgagtactaaaaccttgccttgctaccaatagacaagggtccatatcacaggaccaggagttagacttattcatagttccttggaccaggaatggagcacaaagggcccaaataagccttattacctgtgttgagtaaacaaagatcccagtgcaggagatccatatcatggcaccaaactatcaaatacaggatgcactaggtcattaaagagaagattttattcaaagcattgcaaaatggagaacattgatttatggtgaatatcttgaagaaaaggaagggggtctggggttctataggggcaagaaaaaacgggagtcatccagaagtcttataaaagtcatgaagaagggtggagatgggtcttatctcagaatatgggaaggcagtttgggcctttgcattagttgtttgccagacactaaagggtagagaggtttcttaatcattactcttttccggaagcacagggctcaggtaagattgaatatttttcatgcctttcatcctctctgtctgatctctttcaaactgtcttttttgttgaggctatatgaaatgtttactgttttaccttccaatcaactccataaaaacggttgatataaagcatctagccaagttccactacattttagtcattcattatggaacatcatcccaaggaaggctttattctctctgtctaagcaagcaatgaagggagatcttttggaaatggcctagtatttgatgagaagcaagaacaaggtctacattagtggatcacagactttttgccactgagatccaccatcgaaaatgcattcattattacctctgcatgtgtttatttaactgcaacaatagtttaatgattttcataacacaaaacttcacagtgtatgatgacactgataccttctagtctattcccagctgttctatttcatttttttatagcttatagtgactcattaaaatggatttccacgaatgcaatgcaacacacagtttgaagtccactggaaaatcttttaaaactgttattataaaatgaatttagtaaccttttcaaaattttactagtgtagtttctgtggtttttaagaatacaaatattttgccttctggtcttttttttcacacaagtatatggcagattcctataaatattttaatagatcagcagtttccaatgccatgtttcggtgatgatattttaccagagatagtctgtaatgaaaaattgagacaaatgatgacaatgtaatttgcagacatgtatacttatttataataaatttgtagacatgtatatttagttagttattcaacaaatattcagtgccttttatatcttaagaatggttcatgttaattggaggcaaacaagaaaggcaaagttactgcttagttgaaatttacattctagtataaaaattgccatatttattattattattattattatacttaaagttctgggatacatgtgcagaatgtgcaggtttgttacataggcatacgcttgccatggtggtttgttgcacccatcaacccatcatctacattaggtatttctcctaatgctatccctccccgctccccccaccccacaacaggccctggtgtgtgatgttcccctccctgtgtccatgtgttctcactgttcaactcccacttatgagtaagaatatgcagtgtttgtttttctgttcctgtgttagtttgctgagaataatagctttcagcttcatccatgtccctgcaaaggacacaaactcaaccttttttatggttgcgtagtattttgtggtgtatatgtggcacattttctttatccattctatcattgatgggcatttgggttggatccaagtctttgctattgtgaatagtgctacaataaacatatgtgtgcatgtgtctttataatagagtgacttataatcctttgggtgtatacccagtaatgggattgctgggtcaaatggtatttctggttctagattcttgaggaatcgccgcactgtcttccacaatggttgaactaatttacactcccaacagtgtaaaagtgttcctatttctccacatcttctctagcatcttgtttcctgatgttttaatgatcgccattcaaaccggcgtgagatggtatctcattgtggttttgagttgcatttctctaatgaccagtgatgatgagttgcgtttctctaatgaccagtgatgatgattttctcatatgtttgttagccgcataatggtcatttctctaatgttagctgcataatgtcatttctctaatgaccagtgatgatgagttgcatttctctaatgaccagtgatgacgattttttcatatgtttgttagccacataaatgtcttcttttgtgaagtatctgctcatgtcctttgcccattttttgatgggattgtttttttcttgtaaatttgtttaggttccttgtagatcctggatattagccctttgtcagatggatagattgcaaaatttttctctcattctgtaggttgcctgttcactctgataatagtttcttttgctgtgcaaaagctctttagtttaattagatcctgttcatcaattttggattttgttgccattgcttttggtgttttaatcatgaagtttttgcccatgcctatgtcctgaatgatactgcgtcagttttcttccagagttttatggttttaggtcttatgtgtaagtctttaatccatcttgagttaatttttgtataaggtgtaaggaagaggtccagtttcagttttttgcatatggctagccagttttcccaacaccatttattaaatagggaatcttttccccattgtttgtttttgtcaggtttgtaaaaaatcagatagttgtagatgtgtggcattatttctgaggcctctgttctgttccattggtctatatatctgttttggtaccagtaccatgctgtttgggttactgtagccttgtagtatagtttgaagtcaggtagcttgttgcctccagctttgttctttttgcctaggattgtcttggctatacaggctctcttttggttccatatgaaatttaaagtagttttatctaattctgtgaagaaagtcaatagtagcttgatggggatagcattgaatctataaattactttgggcagtatggccattttcatgatattgattcttcctatccatgagcatggaatgtttttccatttgtttgtatcctctcttatttccttgagcagtggtttgtagttctccttgaagacgtccttcacatcccttgtaagttgtattcctagggattttattctctttgtagccattgtgaatgggagttcactcatgatttggctctctgtttttctattattgatgtataggaatgcttgtggtttttaaacattgtttttgtattctgaaactttgctgaaattgcttatcattttaaggagattttgggctgagaagatggggttttctaaatgtacaatcatgtcatctacaaacagagacaatttgacttcctcttttccaatttgaatatactttatttctttctcttgcctgattgccctggccagaacttccaatacaatgttgaataggagtggtgacagagggcatccttgtcttgtgccagttttcaaatgcttcctgtttttgcctattcagtatgatattgcctggggggttgccataaatgactcttattatttttggatacattccatcaataggtagtttattgagagcttttagcatgaagtagcattgaattttatggaaggccttttctgcatctattgagacaatcatgttgtttttgtcattggttctgcttatgtgatggattacgtttattggtttgtgtatgttgaaccagccttgcatcccagggatgaggctgacttgatcgtggtggataagctttttgatgtgctgctggattcagtttgccagtattttattcaggatttttgcatcaatgttcatcagggttattagcctggcattttctttttttgttttgcctctgccaggttttgctatcaggatgatgctggcatcataaaatgagttagggagaagtacctctttttctgtcatttggaatggtttcagaaggaatggtaccagctcctctttgtacctctggtagaaatcggctgtgaatctgtctggtcttgggcttttcgattggtaggctattaattactgcctcaatttcagaacttgttattggtctattcagggatttgacttcttcctggtttagtcttgggagggtgtatgtgtctaggagtttatcaatttcttctagattttctagtttatttgcgtagaggtgtttatagtattctctgatggtagtttgtatttctgtgggatcagtggtgatatccccttcatcatttttttattgtgtctatttgattcttctctcttttcttctttattagtctggctagtggtctatctattttttaatcttttcaaaaaaccagctcttggattcattgattttttaaagggtttttcatgtctctatctccttccgttctgctctgttcttagttatttcttgccttctgctagcttttgaatttgtttgctcttgcttctctagttcttttaactgtgatgttagggtgtctttcccactttctcctgtgggcatttagtgctataaatttccgtctacacactgctttagctgtgtcccagatattctggtacgctgtgtctttgttctcattggtttcaaagaacttatttatttctgccttcatttcattatttacccagtagtcattcaggagcaggttgttcaggttccatgtagttgtgtggctttgagtgagtttcttcatcctgagttctaatttgattgcactgtggtcaaagagactgttatgatttccattcctttgtgtttgctgaggagtgtttcacttccaattatgtggtcagttttagaataagtgagatgtggtgctgagaagaatgtaaattctgttgatttggggtgtagagttctgtagatgtccattaagtctgcttagtccagagctgagttcaatggaatatccttgttaattttctgtcttgttgatctgtctaatgttgacagtcaggtattaaagtccccactattattgtgtgggagtctaagtctctttgtaggtctctaagaacttgctttatgaatctgggtgctcctcatattgggaatctggttgctccttgtatttggatgtgtatatatttaggatagttaactcttcttgttgcattgatctctttaccattacataatgcccttctttgtctttatctttattgatttgaagtctgttttatcagagactaggattgcaacctctgctttttcttgctttccatatcttggtaaatattcctccatccctttattttgagcctgtgtgtgtctttgcacgtgagacgtgtctcctgaatacagcacaccaatgggtcttgactctttctccaatctgccagtctgtgtctttaattggggcatttagcccatttacatttaaggttaatattgttatatgtgaatttgatcctgtcattatgatgctagctggttattttgcctgttagttgatgcagtttcttcatagtgtcaatggtccttacaatttggtatgtttttgtggtggctgttaccagtttttcctttccatatttagtgcttccttcaggagctcttgtaaggcagacctggtggtggcaaaacctctcagcatttgtttgtctgtaaaggattctatttctccttcacttatgaagcttagtttggctggatatgtaattctgggttgaaaattcttttctttaagagtgttgaatattggcccccaatctcttctggcttgtagggtttctgcagagaattcctctgttagtcttggactttcttgaagaaatgggcttctctttgtgggcaacttgacctttctctctggctgcccttaacattttttcctttatttcaaccttggtgaatctgacgattgtgtgtcttggggttgctcttcttgaggattatctttatggtgttctctgtatttcctgaatttgaatgttggcctctcttgccaggttggggaagttctcctggataatatcctgaagagtgttttccaacttggttccattctccccgtgactttcaggtacactaatcaaatgtaagtttggtcttttcacgtagtcccatatttcttaggggctttgtttgttccttttcattcttttttctctaatctcgtcttcatgctttatttcattaagttgatcttcagtctctgatagtctttcttctgcctgatctattcagctgtcgatacttgtgtatgcttcgcaaagttctcatgcagtgtttttcagctccatcaggtctttatgttcttctgtaaagtggttattctagtaagcaattcctctaaccttttttcaagtttcttaccttccttgcattgggaggagcttgttattacccaccttctgaagcctaattctgtcaattcatcaaactcattctccatccagttttgttcccttgctggtgaggagtttgtgatcctttggaggagaagaggtgttctggtttttggaattttcaggctttttgcactgatttatcctcatctgtgtggatttatctacctttggtctttgatactggtgacctttggatggggtttttgtgtggatgtcctttttgttgatattgatgctattcctttctgtttgttagttttccttctaacaggcctctctactgcaggtctgcaggagtttgctggaggtccactcgagaccctgtttgtgtctacggccataccaccctgaatgcgcccgatctcgtctgatctcagaagctaagcagggtcgggcctggttatacttggatgggagaccctgtttgcctgggtatcaccagcagaggctgcagaacagcaaagattgttgcctgttccttcctctgaaaactttgtcccagagggacacctgccagatgccagctggagctctcttgtgtgaggtgtctgtcaacccctgctgggaggtttctcccagtcgagagggatggggatcagggagccacttgaggaggcagtctgtcccttagcagaacttgagcactgtgctaggagttctgctgctctcttcagagccggcaggaaggaatgtttaagtctgctgaagctgcacccccagctgccccttcccccgggtgctctgttccagggagatgggagttttatctataaacccctgcctggagctgctgcctttctttcagagatgccctgcccagagaggaggaatctagagaggcaatctgactacagcatctttgctgagctgtggtaggctctgccaagtacgaacttcttggtgctttatttacactgtgaggggaaaactgcctactgaagcctcagtaatggtggacacccctcccctaaccaagctagagtgtcccaggtggacttcagactgctatgctggcagcgagaatttcaagccagtggatcttagcctgctgggctccatgtgggtgggatccgctgagctagatcacttggctccctgactccagccccctttccaggggagtgaacagttctgtctcactggcattccaggtgccactggtatgaaaaaaaactcctgcagctagcttggtgtctgcccatatggtaaccagttttgtgcttcaagccatatttcttttattggaaaatatagaacttttccttctcacattcaacttcttgagaggatctctttgataatgtgttcatgtacacagttcacatcaaatatatataacatgtggatcaaagtgttaagatattcttctttacatatagtgttagtagctgacgatttttttttcttcaaaaataaatttggaaacttgtcagtccataatttttttaagtattattttactatctcatgaaatctgaaaggctagaatacactagataactcttgatttccactcctaccctgccatgaagtgataattcacatctggctataacttcataaaaggggcagggcgacccacttcctaaaagaccactattgacttgaagacctgtgtctcttgtctcacttctaaaagtgatttaaaactcaataactcactctgaaatccactgtataagaaatagtaatgtttagggtcatttaaaagaaagattagtttaataaattttggcaccctgtttaacatataaaaccatgaccatgtgttaagtataaccatattttgtgcagaatgtgattcaaaagactgatttaatagctatagtccaagaagtgttgaaaactcttgcccagtttatggtttccaatataggacacatatcaacagaataagaaactcaagaattaaactgatgactgtgtcgacctctggaggaactcttttttaagacacaaagccaaattttcaccttcatttatgcacactcatctcctgaaggcttccttatgcatttacgtgtgaaggaaggagaggatttgactcagtctctttgtctgtcatctttcttcctctctcattctgaaatagcttttcacagttgaggaaaaaataaagatttgaccttcccacagtgaatgataacaatgataacagctgatctttatatagtgtttattatatgacagagatcatttcatgcactttgcttctaagaactcatttattccttacaacactgtaagtactgttatccccattgcacagacaagaaaaatgagcttctgtattagtccattttcacactgctataaagaacttcctaagactgggtaatgtatagaggaaagaggtttaattgactcacagttctgcatggctagggaggcctcaggaaacgtacagttatgtggaagaggaagcaggcatatcttacatggtggcaggtgagagagagagagagtgtgtgaaggaggaactgtcaaacacttataaaaccatcagatctcgtgagaactcactcactatcacaaggttttttgcacagacaaaaccacccccatgatccaatcacctcccactaggtccctctctccacacatggggattatggggattacaattcgagatgagatttggatgtgggcacagccaaaacatatcaggtacaaacaaatagtggagttaaaaatcaaacatggaccatctgcctctgtagtccaggcccttaaccactacattatataacctcttgagagaggaaaacttagattgggcaatattagcatccaattgccagtgcaaaaggaaatggaagtcagcacaccagcttattacttacccgagatcaataagagacctgcaaatacttgactccgggttatagacttggtaaatccaaatgatttctctcatgaatccgaatccctgccagtaatgcagatattctaacttgagacttaccttccagactgaaaatgccaaatgagaaaaaccaagtaagtttgagtttctgcagttacaaagtgctatggtttgaatgtccctatcaaaactcaggttgaaataaaattgccattgtaatggtattaggagatggggcctttaacaggcgattaggccatgagggctctgccttcataaatacattaatgtcattattgcaggagtgggttagttatcacaggagtgggttagttattgtgggagagggttcctgataaaagcataaatttcacccccgtccactccatcttcagtgctcacttcatccttccaccttctgccatgggatcaccatccccagatgccagcatgatgttcttggacttcccagccccagaaccatgagccaaataacttctcttctttataaattgcccagttgatggtattctgttatagcagcagaaaacagacaagacataaaggaagacacataattaccctcccccaacagttcatgttacccctcaacattgttttagtcagtgcaagactaccaaagtataggtgtctgaacatcagggaaatgtaaatagagaaggtaaatgaattcaaccttccttttccctatactctcatttctgtcaaatataaaaacctgtgggttttacccttgttccagtttacataatcacattccaaattacttatgtggacttttatgagggctttttttctttacacctctctccttttctcatcagcctctgcaatcagctttatacaagagttatatttcattcatttcattttcttttctttctatttcacaagttctgggacttggctgtcaaccgaatcttgaacttggtaattaaattgttcataagctccaaacatgttgtaactcatgtcatattcatgtacacttctctgccccaacttgataaaatgagtgatactgggacaccattgtcatacacacctccaaacctgggtgtgtccacttcaaatgcctgaacttgctcaaatagaaatgggattactaaaacaactatatatcctcaccatgctggttttagtaggaaagatgcatcaaggataaagctctccagtgaaaagcatggggctgaaagaaggaagtctctctgaggcagaagtcctttggaaaaactgaagatgacgtcctagataattttgaagtcttatgtagcaacagaagtttatgtcattaatttagcaaatagtcatagacaaaacatgcaactttagagcaagtgccaggctgtgccaataattccacccttcacctccacatggggtcagtccatagaacaaaataccaaaggccttagtgctcaggtcttttgctcctgacattctcccttcatcctttccctatccccacttatccttttttaatgcactatagatgagtatgtcttaatttcttaagttaatttgcattggcattaagcacctactttatttatttcctttctcaacaactctcagactttgattcttcatgtccttccagggccctgccccatgccttctgctaaatgctaaagtcatgcaacagtttagtactgcgtagagtaggatggctagcaaaaggaaatctctcaaaggagcttcatgctctctgtgactcagggtagcagtatatggccttcggcacccactgtgggctgggctatggcagactttgcttgccctcattgctctctttgctttccttgatcttgcccctgtctgtcttcattttctcccttctcacttttttccctattgttacttacagtttaagttatggaagaaaaacacttaatgcttattggccactggaggatacacctcataacttggaaaatgaaaataaacactttaatagttttgtacttgatatgatgactcttttaaacaaaacactttttatctaggcatgaccttagatttatgggaaaagaaagttgcaaagatagtacagagagttcctgtatacctgtcttctagcttatgctaatgtggaaaacttacataagtgtggcacagttgtccaaaaaataaattcacattggtataattctattcactcaaattcagactttactcatatttcatcagttttttcattattatcctttttcttttcccagatctaattcagaataacacgtgtgttactacatgatgatttaaaatgtttacaaaaacaagacctctacctatgctcctattagtgtgtgtgtgtgtgtgtgtgtgtgtgtgtgctggtgtgtgtatatctttatttaataataaaactagaagggcaatgaattcgaaacggaggcttttcttactagcctttttaagatagacattgctgacacatggacagggattgaattagtacaaatattaaatatcattaagccttcttttttgagttctgtctgcacatcaacttcacctgaagaatgtttgtaaaatacacatgcttgttccccacccaaaatctattgaatcagaatctctagggagtgaggaccaacagttgcgcttttaacacctccactccccccttgtattggacggtaaaggccagaaaagattaccttaggcattctcatttcagaagctaaaacagacattcaattttctataccctaatttgggacttatatctgagtgttaatatatgcatgtaatactttgtgatgaatgttaaatgtgttttaatagtgttcccttgcagaatattctttcctttgccggtattattaagactatcttgcattgggattcatgcccccaggcttacagttctctgagctatacttgcatacactgtcctcagtgaacctgggctttggatccagatcgccttgaattcaaaccctagatctgccacttaaagactcaagaaacttacataacctttttgtaattgttctctatctataataaatgaaaagtattactaattattacttacatgcaagattgttgtgagcgtaaaccacatgatgtgtggaaggtttggggcacagcattctttaccaattcagggtaaccctgaaaacttaggaaaaagagaggattcatataaatcacaaattttgcaaatgcattttaaatcctctctttgttccagctccttgtacagacaggactgcttgctactaagaatttccaacacaacctccaattaaatagttctttgatgtatagtgggtacagaagaagtccaacttatttgcatttgcagaatcaggagacccccccaaaaaatgctggaggtgtgaaagcaagaatcagaatttgtcaggattctccgtaaagtactagcggttttgtagatgctttgcagctgtggaactataaacactcaaccgcagacacctcattttatatctcttctatgtggtatatttcccttgtgaaaatgtgtatttttaaaattcactctgcaaaatgacagtcaatgttatcaaatatacatttatatgcccttgattgtaaaacccactacaaagtttattaccttaagtttaatagaaaacaattttgaaaaatgggaaaaaaatatatctgtcacagggaagtggttagaggttctaacagaggagatttcttgttagaataatttgttgtattttggttatacattttttgtttttctttcgaatgttgaaaaagttaagaatatattaatacatggacaggttagaaaatatgtaaataataggttggtcaaatcctgcagatgacaaatcatgagagtttgccaagctaaggggccctggccactcataccatccctttatctaactcttcctcctcatccagtcccataataaaaaatattaagcttgcacgtggtaccttctcttctaggctacttgttaatgggtcctcttaattggctatgtataaaataagattcccatgggcagaaatctttatctgatctgttcatggacatatccaagtgtcaactagattttggcacacagtagatgtttggtaaatatgtattgaatgaatgacagacactgtgctccacattgtaaacacatcatatcatttaatcattataacatccctatgctatcccctatgtgctattattagctccatggtacagacaataatcaggatagatcaggaaactaaccaaggttacacggacagtacctagatggcaggaggccccaaagcatgtgtactaagcattatggcacactgccttcctgtctggcattcttgggacatgcatgtgtgagcgataaggtaagtccaggaaagcgtggggcactgggagaatgtagaagtagggatgatggaatttcatttccacagtgagagccccccatcctgctcccattgtcagacccgcactttttgttatctcttttccttctgtcttgctacgtttgctttgtcttcttcctcgatagtttcccaaagactttaaacgactaactatcaaagaagagaatatatgtgaagtcactagttacttttctgctcaattagctatatatagattaactttttaaaaaaatattttccccatacacccactcacataactgtgaagcttaggaaaaatttcaagattatcgtgggtgggccccatataaatccccacactgtcaattctcccagcagctgtttcttaattcgtcatcagtgtagaaatctaaatcagcactcagtgaaatctaaaagtccaaaagatttatttcaaatttcaaacctcctccctaatgttctgaggctgtgtcaacacaggtagagagacggggagagctgagggtatttaagaatcacataatgtgagaaactgaggagaccctagggatcttttagccctaccccctcatttacacataaggaaatgggatctgaggccaacagcaaacttgcctgcctgctatctgggaagttctattaataacacactgtcatgggggaaaaaattcatacaggtaataaaggtttgttattttcaaagattaacattctttattaattaccacttttttgaaactgacacagccacaaaaaactcctgtataagaagaatttgtctaataaattgtatgattgtttattgggtatctgtttattttcttaatttttaattgtctgtcaatccttcttgatttaaagtagtcacataaatatataaatgtaaagagttaatataactaattgaattcatttgagggaaaaaaattaaattttctttttaaaaaaagaaagaaaacattaaagacagaggtaacattagcacaaaaaaatgtgtataatcaaagtctagagggaggcctaaatgtaaatcaagctttctagtaagcaaaaacaaaagagaaaacctggttaactccaaggttcagaattgctgtgatatgcagacaaaccagctgtgaagacactgcacaacagtctatgataaaaagacgggagggacatttcttgtttgtatagcaaaggtctacaatttgcaatgcactgtggtaaaacagaaaccataagctgaatgcttttgtcactgaacttatattttagttagaaaagacataagaaactaattgtggcatttaacttataatttagttagaaaagactaaaaaagctaactgtggcatgaatgagaaagaaattactgctctattagtggttccaatactgtgaggccacaggaaaaaaaaaaaggattctgaaagatacggtttggaaagacttcgtggaggaagtggcatatcaacagggacttgaaggctgcctagatatgcaaagaaaaagttcaacggaaatacaggatgaaagaattgggtggtcaaaggaacaaacccacttgctgatagattgtcaaaaagtatagtgtctgcactactatgtgacgatgacattttttttccctttgtcatctaaaattgctatcaggccgggtgcagtgactcacgcctgtaatccaagcactgtgggaggccaaggcaggaggattgcttgtgtccaggagtttaagacaacctggcaaatatggtgagacctctctacagaaaaaattttaaattatctaagcatagtggtgtacacctatagtcccagctactcaggaggctcagataggaagatctcttgatcccaggaggtggtggctgcagtgagccaagattgtaccactgcactccagcctgggcaacagagagagaccctatctaaaaaagaattaattaattaaaaaaataatattgctgtcagtaaagactgactagtctgtgtgatatttatcatagctatatttcataactccagtgacctttttaaataaaaagtaaggtccagttgaccctccctgtctgtaggttctgcatacattcaaccaaccatgggtcaaaaatattcagaaaaaaaaatttaaaaatacaataaaaactaatgtaggctgggtgggtgcaatagctcacacctataatccttgcaatttgggaggctgtggctagaggatcacttgagctcaggagttttaggtcagcctggcaacatggtgagaacctgtgtctactaaaagtttaaaaaattagctgggtttggtggcatgcatctgtagacccagctactggggaggctgagatgggaggatcacttgatcctaggaggtggaggctatagtgagccatgattgcaccgctgcactccaacctgggtgacagaatgagaccctgtctttaaaaaaataataaaaataaaaatcaatacaatataacaactatttagatagcatttatgttatattaggtattacaagtaatctagagatgatttaaaatataggaaagaatgtatgtagcttataggcaaatactacgccgttttacatcagggacttgagcatttgcagattttggtatccttggggggtcctggaaccaatactttgaggatactaagagatgattgtccattaaaaatgttttaccataaaggaaacattttatctcttctgtgtcagtctgtgaccttttgggtggaatctgaacaatgtgtaaatgatagtttcccaacagtgtgcgctgatgtgtaggagtagaaaatgatcctttggttttcatataaaaactttcttatgaaacatgaagctaacaaccaagaagattaatcccaccagtgagacacaaggaatgcttaattttggaagtgaagctacttcctcatccctgaggcagcacatacactttttcaataatcctttatttaacaagatccaagaatattaatatctaacagcttagcctaaatttcttgaaaggaccaagcccattgtgttgtctcctgacttgattttcccaaactgtcatggattttctatctaaggaagatgagttccttagttctgggaaaacaccattgaggaaggatgcttcagaagaggaagggatgtcagccagggcagataaaattagcaagaaatattaagattaagtgctatctaagaggtacaaaaaataatagtgtttcacctcaatagaatcttattgttaaaaatacagtgtatctacagttctgaagattatcaaaacacaatattctagccccaaaacaggaaaagaataatgattcttaagaaaaaattctttctgggctgggtagggtggctcatgcctgtcatcccagcactttggaaggctgaggtgggtggatcatgaggtcaggagatcgaaatcatcctggctaacccagtaaaaccacgtctctactaaaaatacaaaaaaaaaaaaaaaaaaaattagccagacgtggtggcacatgcctgtaatcccagctactcaggaggctgaggcaggagaatcacttgaacctgggaggcggaggtggcagtgagccaagattgcgccactgcactccagcctgggtgacagagccagactccatctcaaaaaaagaaagaaagaaaaaaagaaagagagagagaaagagagagaaaggaaggaaggaaggagggaaggaaggaaggaaggagaaagaaggaaggaaggagaaagaaggaaggagaaagaaggaaggaaggagaaagaaggaaggaaggaaggaaggaaaaatattctttccatccattacacactgtaatgtaaaatgatgtgtcccagacaatggtctgtaaaccacattttgtaattccattgtaaaagataatgtagtgcgagcaaggccaaaaatccactattctttggaaaagtgtgccatttaattccactgaagataaggcagttggcacaagtcaacttttccccctggcttagatgtagttgtgcctttcaaaatgagctctctcatttgccaaatacaaagaagagaatagtgttttctcagaggaccacaggatatcaaacataattaaaaataaaagtaagattccctttgaatctagaagaaaactcacccaaatttcttgtaccaaatgaaggtatactgcagattttatcacagtcattaccatgagcagtcaataattccctgaatccctgttggacagaattacatcaggtacatgtgttgtgatgttttctgttttgagttctgtttgttttttatttattggtaattcagataatctcagtttcaggaatttgttttcttctctcctaaaatggagctgatgttcatctcttccttatgttatacctgtatttatgcaccaatttcatagaaaaccatcgtgcattttcccatggaattttgggtgacagtttaagatcagcgtttactataatgggcagacttaaaatggtccccgtgatccctgactcctgaagttcactcccttgtatgcttccccctctttgaatgtcagcggacctttaacctagagaatacagcagagttggccagatatatgtgattccatggttatcttatgtaagattggagtgcatgtcttgctagagtcttttacttccttattgactttgaggcaccaaggggccatattggggaaccccacatggcagcctccaactgagccaccaaagaagtgaattctgccaacaatctgaaggagcctgaaagcacagccttccctggttgagcctcaaatgagactgcagccctagccagtactttgattacagctttatgagatcctaagtaaagaaacaagcataactgagtcaggattcctaagccacataacccgtgagataataaatgtgtgttttaagtggctgtatttgttatacagaaataaaaaatgaacatacttactaaaaaagtttttagctgttgtgagtcctggtaattggatttgttttccagtgatatccatggacactgtgtcaatagtgatgattgatgctgatttgttttactcttatttattcaggatctgggtattaaaaataaattcaaactttcaacaggctgatcacctctgcccctctccctattagcatgtgcatgtgtgtgtgtgtccatgtgtccatacatgagtgaatggatgtgtatttaagcttaatcatgacacagggggttgtttatacagggtttttagaaaacaaaaacattgtctctatgaggcagttccttagaagccaactctcaacagtgtctcagtgtttccctcctgtaatttttccacacattatgcactggattttagtttgtgatactcaggattagtcatgaaaccaagtctttttgtgttctatggtttgaccagccctgtgcaagtctccagggaagcacgaaggacgggtaaatcagagtcccatcccttgaagcatggtggtattagaacatcacttaaagaacagggatacattacccatttagtgaaataatctagaagtcctggaaactaacttagctcacaagatgatattcattagccaatttacttcagaaactttaagaaaatcactttacctcctctgtacattcctccttccctccttccctctcttttcctctctccctccctccttccctcccttctttccttccttccccatattgttattaaatatgctcattattagaatagtatcaaagacactgaggcatttttagatatcttgtgaaatactccttatttttgtctcttcctttagatatcttaattatcaaaataatctaataagactctatttggaaataaagtgaaggagggtaaagttgtgtttttaaataggctgatcagtgctagaaataataggatagttttaaattctagcaattatagatcaaggctccatatactatttctaaaaagtctgtgaacccctgggaattgtgaatgtttcccattacatcctgccaacgattcttattaacctattggtgacgtctttcccagaggtgaagctttgatctgcttgtcatctcacattctgtctcaccacagtctagagcttccaggtccatggggaacaaggatggggcagcagcttccctgtgccaggactgactgggaaattccagaattctatgaccaggtacctgggaagggagaagagctctctgagttacagttagtctgggagcttttgaagtgaaactgtcatagggaaagtgaaggaatttgctttgtgcaatcatcatgccatagtctgacaagacaatggaaaaagaaagaaggaattttctctcaagatgtcaaataattagctgagtcatgaatgcaagcaggtaggcagaaaacagatatttgtagagaacttatttctctttctcctaatgaagtttttgaacaacaacgataaaatggaccttttgcctaagaagcaatttaacaaccattgcttcagtaacacgagaaccaatgtgattagagtgcttgtgctctgtcccctcataaatggttagtattgaggccttataaagaaatataacatctgctttttatacataaatacctacacgtaaccatccacaaataacttacgaatacccataataaacacagaatccatcattatgttaaatgccactgtgattctgagcattttaatatgctgtgaaggcatcagagtaaaacagaaacaagttatatctaaataggaatgcccagtacatttaaagtaatgagacgttttgctaaattcatatgttagcaatatgtcatgtggagtcatgaaggatcagaaataaaaaacagtaattgtccaagccgtcaaggagggatcagaagcaggctttgatcccaggctctgagtagagttgctgtggaattgtagattacatagaatacaggtggcatcaccacagattcctgtttatgtatttaacttgtaacttctcattctgacatcacaggaatatttttccttaacaaagtgaaataaaaagtaaataagctctttaatattgggacataaccaaatcagagggcaacacaaatttacatgggtacttgtgaggcaaaagaaagaaaattcaaaattcacttctaaaaatggacattgtttaaagcacatttaataagtgttacagagtgatgtttcactgtcacctttaaataccccttactgtttctttgggattaccaatttcaacatgaaggtccgagtgaactttgctagaggtgatttgcacaggctcatatgcatctcttcctcatattcagtgacctcacattagcagctttaaattggccatgttgagaacattgacaccacagaaattggcaaaaactagaaatcaagtaacacatgctacaagtctttttttttcttttctcccttcttggaaaattgtaatccagttgttaaatatttatcattataaagtagatccttgttaaaaatattctaatcctcaccaatggttttattttctttctgcctctcttctgctgcccctaaattaaagtaggtctttttatttggggctaagactagttccatcaaaatataaaatagatgaaaagtgttttggggcctttttgccctcttttcctagaccttttctgtttctcctcttgtcaaaatctcacttttttcctttaccttttcagccctgcttcagccctaggtcttcctaaaccagagaattttccaaaaactgcgtgaatatatatgccacaggctgaaatagtcttcccaaaaattagtcattaaaaaagtagagaaagaagatataagttttacatgaaaccctatatagataggagttccttcgagtattttcaaacttgattaacaacagagtaaattatttaagaatgatttaagaaatcaaagtatgagaacttggggctgatccaaagatgtggggattcagagatgaggggcaggcatagaagaggagaagagactgagtatttgtcaccacgtaaattcctgggcgagttgggtaaattttttattataagaaaacactcctttttcttctatataaaatttttttcaagtgagttgctaagttcattgtgagtcatgcattcctttgttcaagtgtggacaaatggtccttattttgttggaattttacactggcagagatcaatggtacaacctggtgaaccccccacaccaaagacacacaggtgtacttaaaggctgatcttctacagtacgcatctatggactggctttggggtgtgttcccaaacactcagagccaccttgagctggggaactggttagtacaagtctctttatgtgtcccttactctacaatcatgcacctagggtcgtgcaaacatcctgaaaccaacccaagctctaggagtcagaaaaggccctgaatgcatcttcaatacaggatctgtgcacacagcatggcctgcttctagaaaaccaatggggctcagaggcagtccagacagaggccttattttaagggctgatagaataggctgtgtttccccaacagcctaccttggtgagtaaacaccaacaattaattcatttatttactcactcaggttagaacattgtgttttcaagtttctaatattaaatttctttttcttttttctggaatagggactatcttattcagctcaaaataccatagactgaggcttaaacaaagacatttgtttcccaccattctggaggctggaagtccaaggtcagggtgccagcctgcatggcgagggttctggtgagaactttcttcttggcttgcagatggcagccttctccctgttcccttacttggcagagagacagagtgagccctggcatcttcctcttcttataaggatgctatattccatcatgggggcccaaccctcatgtgcttatttaaacctaattacttcccaaagaccccacctccaaatatcaacacattgggagttagggcttcaacccatgaattggtagaagggcgggaggtggacacaaacgttccatccataattctagctggtaacatcattgttagaatcagttgccttgccagtctcagaaaacaggacactgagatgcaaagacatgtacatttccatttgaggcaggtgccaggagacaactgagaggacactgagtttagaacattggatcaggcattgagagggaatctgggttgctggatgcaagaggctagtaaggggtgatgagagttcttcacataaatcaacctataactcacccagcctctgtgtcccaggggcctatccattattgatcaaaatgtcagtagaccttttgggttgtgtttcaaagagtaaccattatcttagagattcatagcaaaatatgagtggttcccagtaaaataaatcagagtttcctttatcttagctagaaacacctattgggacttttgtcaaattatttaggggaagaagaaggttgaaagcaaacttccaattgaaaagaagcatatttattgaagttcagagggctggagcgttgttttttgattgacaaaataatgaactctctgataagagtccagaattagttggctgaatttgtattcatttctccataaatttgccaaagttagaagagaaaatccatagaggccaaatgaagaaccatttgattaagcgtgttatcagcctggttgtggccaaattccacctcatatattcatgcacacattctttgctatgagttgcatatgtgctttgtggttgtgggcagatttaggtttgtttttctttctgagtcttttctggtccaaaagctcatcatttaaagttttggaagcaatttagaaagctattagattcccaaccccctcccgacttttggaacacttgcagttatttttttctggcacaaaaacaatcaaaaaggaaaaaaatgtcaggatatcttccaaagagagacataaaggtaacattttatttataccatgatttgtttattcttatttgttgttaccataaaagttatttaatttttttgaactgaaaggcagatgattttaggggataaaaaacctaaaataagaagtgttgctatgtgattacagagaatagttgcttttgttctgcctgtgtttaattaaagcaccatttgagaaattcaagaatcaggtggtaccgttgagtcactggacacatttttaagcaccatcttgaaatgtgatataaattgattttaaattttaaatttgtaatcatacacttcctctaaattgggaatcatgagagcatttctttttaagtagtttgtgataattttggaatttgaaagaaactttaaaggtaatgtatttaaagttactcacagaaatatgctggatgtgttgactggtaactttaaacatgtttatattgctatttttctagcacttgaaaagtaatcatgttttatagccaaagtcatctcctgtccatagaacaattaatagtcataattgatagttttatgcatgaaaattaagtattgctcctgcaaaactgaggagttaatgtctttacgtgctttttcacaaacattccttataatggaacaccaaatgcctacaatttgaacacatggctggtggaaaaaaagaagaaaaagaaaatcaatcctaagccagaaatctgaaaaaagacagtgactttgggtcattttgtaatcatctttggtgcttcagtgactaaaaaatacatgcagagtgcaagagcaccttgctgaatcctacaccctgccctccttgtgcagttatgttacatgcaactccaaagcctccacagctgttgtctctactctccattcaaaacaatgcacgtgcaactttcccttgtggctggcttcgtcctccacacaccaatgctttgtgtgaaaaggtttcattaaaattgagtttagggtaagtacgggataggtggagaaaagattttcttctaatgcttctccagaccacactgtttagccttcaggagacccaggaattgatatgagcaaaatgtttttacacatgaactgttctttaatcccttttttgcttcttcaatccttgaacttcattccctttcttttcattaacatttacaacacacactttacagggaaagaaagtgaaagatatgtaatgattctgcctgctacatctgactgtactccatttctcacattctatcctcatctttttctagccacctgagtcttcagacagttttaccatcttccctattttaaccccaatttaaacatccacaggaagccaaacaaaatatgcccatctgctccagatgtgtcaaatcaagttctgctattttaatttttttccaggcaaaccctccaacaaatgtataaacaggttgctttttagaagaagtaaagattaatgtctctctgggaaaaaaaaatcccatgcattttggaaagtctggctgttttccccttcaaaaaacttcatgtaaactaaatgcatggcttgatcctcccatgtaccagaaggggagcagcatctttgagctctcttcccaaatcctctgcttggtctgggcgtatcctgtgaatgaggagagaatctaccccacagccagatgcttgcatttggccacagttcatttccaggcagcctggaagagagcatcccacaacattgaacagaggcagccaagatactgtcgggtgatcaggacagctcccgcctctgtgttcctgtggagcctccttcctctccaaggaatttgtcgcatgggactgcataattcagttgtccattcagtcaacagtgatttactaacaacctactttgtgttaggcactgttccagggtctgcgcattcagcagtgagcaaaataacacaaaatgcttgctctcatgaacctggagacagacggtaagaatatacagcgataggcaacatggtaggtggggatgagtgctctgaattaaaataaggcaggacacagagatggagagtgacctggacaggacagggttggcagctcagaagtgcattatctacagtggtcagggaagcctctccagtgaaaggacattaagacggagctgaaggaagggagagagtggatgaaagagcaaaatccctggaactgggacatgcttggcaggttgagtgtccacaagagccccaattaactacaggagggtgagcaaggagagagtagagggagttgaggttagagaagtaaccgtacgtcaaattatggaggactgagtttctcaaactccagtgtctgcgcaaatcccccagggatcttgtgaaaccacaggccttgatttagaagatctgcggcaggcccagggtctgcattcctaccatgcccccagatgatgcccctgcctctaccgttccccagaccatgctttgagtagcagagatgaaggccttcttgcccacagtacaaattctgctatttctttcctgttaatttgaattggtatgcaacaactgtacatatttatgggataagagtgatatttcagtgcatgtatacagtgtgtaatgatcaaatcagggtagttagcatatccttcactgtgaacatttatcatttcttcatgttgtgaacattcaaaatcctctcttctagccttctgaaaagataccccagagtattgttaaccatattcaccctacagtgccacagagcactagaattcattcaccctatctagctgtaactttgtatctattaaccaaactcttttcatctttcactctcccatacccctccctgcctctaatgactacaggtctatctctgtttctctgagttcaatttattttagcttctacatatgagtaagaacatgtggtatttgtctttctctggctggcttattttagttaacatgatgttcttcaagctgatccatgtttgctgcaaatggcagaatttcattcttttttacagctgaatagtattccattgtggatatgtaccacattttcttcatccatccatctattgatggacacttagattaaaggtactctgcttttactatgagtgaagtggaaattttttgaggcttttctttttatgagacaggatctcattctgtcccccaggctggagtgcaatgtcacaatcataattcactgcagcctccactcccagggcacaaatgaccttctgcctgagcctactgagtagctaggactacaggtatgcaccaccacaccctgccaatgttatattttttgtagaggaaggttctccctgtgttgatgaggctgctttggatgcttttaaatagtggggaaataggatcagactcatttttagggagcccctctggctgctctgtgaaaatagggcaagggaggaaataggagacctcctgggagataactggagtagtctgggtgagatacttcagtgccagcatctaaggtacttgcaggtgggacagccacaacgaatgccacttcaagtgaatgtgaggatcagctctgctgcccacgtggaaacataagtaaggttgttacctgtggccttgcagaagcctgcaagtcaaaggccttttgatggttggtgaaaatcacatctgatatgcgtgattccaggaagctcatctgcctcattcctgaatttaatttctatccatgatgcacatattactattgcattaaacgtgaagtcattgcctcctgccattgtaatgtatgcatgctattgcagaggaaatgtttttatctacctcccaaataagtaagcataacttgagctcgcattacaaaatgacacaataaactaaaaaggaattcatttaatatttttaaacatgattttggtgtccttatatttagggaaatattttattgtaagttcatcttacaataaaatttataagggaaagatattttattgtaagttcatctcaggacaagaaacttcacttggcatagaaattaacatccaatctgcagcctgtcattgtagtgagatagtcttgaattccctagctaagttatttacctaaacaaagtcttgttcactttgaatttcctagctaagttttttacctaaacaatcattatatatgtttcaaaatatttaaatttttcccttccctctgattttataattttcttgataaaccttcctaaatatctttaaatttcactgatctaatggttcttaaccaggggtgattttgccccccatcaagggatatttaacaatatctggtgacatttttaactatcgggagttgggggatgctactggtatgcagttggcagaggccggggatggttaagcattctgcatacctgggagggccttccataacagaggatcgttcattccaaaatgtcagtagtgccacatttgagaaaccctggccttctggtgaccacaaggccttcagctacagaaaataaaattcaccaaagatccccacagccatgctttgaaatccttcacagtttgcactgagccatgcttcccacaggctgctccaatgaaggggattactctgaaggccagctttggctcctggattctccaacatccgtgccaaacctttcttatgcagcacagtagcctcagacatttccagctcactcccacttttctctcaggacatttttcctataaaattcttgcacatttaatctcatttagaatctgtttctcagagatcctggattaatatatcatggcattaaatcattgaaaataatgaattaatgatctttcctcattgtagtgatatgggaagaaaacgttctgatacacagaacacagaaatggctcagaaatgagaaactgactgactactaaattgttagtaaaagcaacagaataagtaagtgaaaaatagagcaatttggggggaaaaaaagttgagaaaccccaatcttcaaaaaaaggataaaagtcttagcttttgttcatgtgttatttaaaacccaactcaggcctcaactgaaacaactaaaattaggaaccaaaattgcatcccctgcccattcacacttttggaaccagagtggttctggacatagtcatgaggtcatcattcctaattagagtaggaatttcaattcttgggtttctaacccaaatctcgctatcctcagaaagcttgacagtatttgcagctctgcccattagatgagatctaccctttgcctttggtcaggaagagtcctatgtatggacacatcaccacagaccactcagattccctcttaccttccctaggacactctgcctcccttcctcctttccatgatactcatcactctgggtagactctgcccaggcaacaattgccctctgtggtttgccaagacccatcctgctttctgggaatagatgagtccctctaaagatgggcatgtccccagccacccaccactgtgcaggtggcagctgacgtctattgtcctgcaactcacatatcctgatctctgctctgttatgaactccagccagagaaatatacagatcttattcctgattcataagagactgtgtttgccttggatttaaccaggtctgatgactttcaggatttattatgttgatgaataaagggaaattctctcccttaaactaacacaatgatctctctgaatcagattctccctatacgcagccagcaatactagagaagccccagagacgctgctacttgagggctggcctaccgcagagctggcgtttatgttgtgatgataaacattcttgaaaaaaccctgaaggagatcctggcattttcctagtgcctttatgtgccataccgagtgcaagctgcttttcatgtactaactaatttaattcctgcaagagtcctgtggcatgggtatttcttattcccattttactgacaaggacactgaggctcaaaaagttgtttttttgttttgttttgtttttgagacggagtctcactctgtcgccaggctggagtgcagtggtgtgatctcagctcactgcaacctcagactctctggttcaagcaattctcctgcctcagcctcccaagtagctgggattacaggcacgtgccaccacatccagctgatttttatatttttagtagagatggggtttcactatgttggccagaatggtctcgatctcctgatctcatgatccacccaccttggcctccgaaagtgctgggattacaggcgtgagccaccacgcccggccaaggctcagaaagtttaagtgacttgcccaatatcacaatgttagtaagtggtagaggtataatttggattttatttgaattggaaaaggctgtgatctttctaggtgatattctaggtaacactagtttccagcaggcactctccattacctgcgtctgttaggtctgagtctgctatggttttctgactgatgtgtagggtaacacaattaaggaactctccactggaaggccaagtctccactcaggcacgtaggtagctggcagtcctccttgattctgctagccagagccagcttattgaaaacaaaagcagtctgttaggacagtgcccagacttctgacttcactacggaggctaggaaccaagtcaatatcatcagtcattactttccatcaacctctatcatttacatgcagtaggtgctcagtaaatgctgataaattcctgtatgaataataaatgaatgaacaaacaagagcatttgtctgtacaagttacagagttttagaatagaatgtaagtgtgaagctcgataaattcaaacttctgcaatatccccaccaagtggttatctaaattccgtttgacttcccttggcagggaatacgcacgcacactttctaaaggagtttttccacttcatatgactctggctgttcagaaggaatcactaattaaatgagatctttgaaaaaagtcaagaaactggaaataagtaggaattgctttacctgatgcttatcagcttacaggctttactgctccaaaaatttggttcgatttgaaaacattatgctaagtgaaataagccacacacaaaagggcaattattgtatgattccttttatatgaggtacctagaataggcaaattcatagagagagaaactagaatggagattcccaggggccgtagagggagagtagttattgctgaatgtgtttggggtttcagtatgtggtgaaaaattctggatacagatgctcacatgtcattgtgggtgtctttcatgcaactgaattaggttttttttttgtttttttttttttttttttttttcagataaaccatgaatcacattttatttattttgtcctttcatttttttttttttttttttttttgagacagagtcttgctctgttgccaggctggagtgcatggtatgatctcggctcactgcaacctccacctcctgggttcatgctattctcctgcctcagcctcccgagtagctgggattacaggtgcccaccatgatgctcagctaattttttgtatttttagtagagacggggtttcaccgtgttagccaggttggtctcgatctcctgacctcgtgatccacccacctcggcctcccaaagtgctgggattacaggcatgagcctcaacttttattttacgttcagatggcacatgtgcaggtttgttacatgggtaaattgcatgttactggggtttggtgtacaaattattttgttacccaggtggtgagcatagcatagtacccaataggtagtttttcctttttttttttgagacagaatctcgctctgtcgctcaggctggggtgcagtggtgcgatctcagctcactgcaacctccgctcctgagttcaagcgattccccctgcctcagcctcctgagtagttgggatgacaggcacctgccaccaggcccccataatttttgtatttttagtagagatggggtttcaccatgttggccaggctggtctcgaactcctgacctcaggtgatctgcctgcctcagcctcccaaagtacttggattacagccacgagccatggcacccggctggtagtttttcttcctcatcctcctcccaacctccaacctcaagtagcctccccccaacagtgtctattgttcccttctttgtccccatgtgtacttagtgtttagctcccacttattaagtgagaacatgcagtatttggttctctgttcttgcattaattcgtttagacatggcccctccagctgcatctatgttgagcaattaaaaaaggttaagatgagctaagtgaggtggtatgcatctgtagtaccagctactcaggacactgaggcaggaggatcacttgagcccaggagttcaaagccagcctgggcaacatagtgagaccccccccatctcttttaaaaaatatttcagatgataaattttatgctgtatgtattttaccataatacaaaattggttgaagaggagtacatataaacacaacaacgaagtgtttaactcatcaatttcagatacacagtaaaagaatgtatatgagaattggtcaaggacattctgaggctttaagcttcaagtcaagaaaaacaactgcctttctgaaaacttacaccgctcacagagtctggtgggctatgaatttgatggtacaacttctaacttgacagtgtggagatcaagggtataggaatgtaaaaagctttgaaaagtttgagagtggagtttgcacagctggacacagggcaccacaaacacaggtggtgcatttgtgcctttggtggacaaagtatcacccacaatgcacaggcgcttccctggctggacaataggtctctctctccatcccctctctctctgtttcaagagaagacattttacgtaggaccttccactctgaatatgaagggtatatcatttccctctcaaatccagactcctctagttgaatggctgacagccaacagaaggggtgtatgcacccttcattaggccagatttactgtccgccttccatgagtggttcagcatgctctctgtccagctgtggctcctgcctgcaaagcgtgccatcagcttcctggttcagagagagctaattttctctaattgcttccaatgagaggtgggaggcaggagggtatgtgccccattcagagccgctgttctcatcagcctcaccaagcagtgagagcagctttcacattcaaggtcttctttccattatttgggtaaaaatgttttgtctcataacctgggatttaagaatcttcaacaggttgcttaacccttaaagatctgacccacctggcctttaatagatttaaagactttatttggttttatgatttttaaaggaatcataattcctacttatttaagaactttaattcctatataagaataatttattctcattcatacttgtaaaaaaagtgtatccattgttttagaaaaggggaaaatagaagacaggttaaaaaagaaaactaaaaggcatttggtgttgcttagatgtacatgttttgtagtatatatatgtggttttgatcataaataatgtatcaaagacatataataccaatttctgttcttttttctgaaatcttagaattgagtccttagaagaaataccaagctaaagggcatgtgaatttctaagtttcctggcacttaattccaaattgttattccaatttctagtgtgccatactacatctttattagcattcaggattatcttcttggttaatatagtaaaatatcattttgttgtttgaattttcattgctttgataattgatgatatttaaagatgtttaggctctttttttctttttcatttgctcagcttttctgaaaacctttaggagacaagtttctcccaaattttttctactgagatttatgcattactgatatgacttctaacatataagctagttaacatcaagaggattagtctatcacaccacttgtcacctggggcaaggtagtatccagttcattagggtaaaggtcaagtaagtgttttgtttgtttaaaggggaacacgggtaggagttatcccaaagttagaacgcaatgaaacccaactatatagtaaaatatatttggggctcaactctgttagccatcaaaggtagtacaaaacatcagaagatgaagagggttttgaaagaaagaagggccatgtcagattaagaggtagaggaacatcaagataatttttcttctattagagtttctcttttagggtttctattagagtttctctaatagggggtagagaaacagcaagataattttttttctattagaatttctccattagagtttctcacctgcaaggtgttgactttccagttacctggcatttcattctactttttggaatggcctgagctgaaattaatcaggctctgttgatgatgcatccaccagggtttcccattggatgcttagaaaaaattccatcacagaatatctgtgtcttgtcttcttgggggctaggagatcccccaaatttttctcttctgttcttgtttgataaaggatgtgtggaggacctggtgcttaagagtttcagtttgacataaaggtactagttctggagagtctcttgggccactttatgttaacaaagactctcttgatcagcctttagttaagcttctctgagctctctccttgactaggcttcaaccttgggcttctgtgtcagtccttgtggagtctggttttagcaagaatcttgcaaagtcagtttagagagaataccccaccttttatatctgatcaatttcctcaatccccacctgtaatgtataagcccttgacctgccttgagtagaaatctcctacccttcatgtctcctcctagtaattttccatccactgaccccacactctgctctttgactctaaatcttcatttgtccttgttgtcttcaatgtcgaggccaatctctttcccctaccataatatctctattgaaatagtcctgaacaaagtcttccttgccattttcacacgtgccagaataatgcttgcctccctgcctgcctgccttccttccttccttccttccttccttccttccttccttccttccttccttctttctttccacagaatctcgctctgtcacccaggctagagtgcagcggtataatcaaggctcacagcagcctcggccttccaggctcaagtgatcctcccagctcagcctcccgagtagctgggaccacaggcacatatcagcacgcttggctaattcttttttgccttttgtttgtttgtttgtttgtagagacaaagtttcactatattgcccaggctggtctcaaactgctgggctcaagcaatcctcttgcttcaaggtcccaaagtactgggattacaggcatgagccactgcacccagcctcacaattttttctttaacaatgcccagagcatatgctgagcttcccgtcactctctggggcggaatggaatattacacaactggcacggtaaagaatgcacttggttttggtggtggataacattttcctttgcacctgaagcacttccacaaatagcccatttgtcctccttgcaattaaattagaaaaactgtctctaagcttggtttgacctatctgtagctctttgaaaagactgcttgatctttcctcactctccgtgtacctaaatcttgttcaggctctgtccagaaatcaataggaaacataaaaccttgaagcattataaaatcaggcattctaaactggaaagggcctttgattatttagcccaaatgcatcacctgttttacagacgagcaacctgaagttcggagaggtggaacttcctccaggtcatctgctgcactggtgatagaggcaggactaaacactctcggtgcagtgttccttctctgagtcatgttgactactatatgctcattcacagtcacaaactaaaaatctcagacaagtcaaaagcatacaattacaggaccagaagactcctcagtgattatctgggagtccaggcatccaagggacttgaccaagtttttgcagctattgctggtagaccaagtacggaaatacacttctcttgactctcagtctagtgctcctttccctgcagtactctgtgcaataccaaaagatatggatctccaggattggctgaggttagcaattaatatggtatttttagtcatgtctacttggagtagggggtgctgatttttgtttcatgtgtgttcttgagactttttgatgaggttccgtatgcctcactctaggtgatgtttttattagtaccatgttgtcttcctataaagagtttttatggcgaacagaaagctgtctggattcttgctatggttgtaggcaggagggaacatggtgtgtggcttctgaacaaactctggctgctctttaagttcaatgaagtgaaaaaaaggcaagttaattgactacagacatatgcaagagagctctcaattgagccataagatcttttgggatgtgggtgtttacaaggtagctataagcactctcataagtactgcacctgtgaatcatggactttcattgtacatagctttccactgcttgcttcttgaggctactgttcagcccatcagtaatttttaaagatcctttagaaagttatatagaggaatgcaaatgtgagtaaacaaggcgcctctacctactgatggcatcttcaatatttacattggcccgttgagttttatcagctggatattgctataaaacacatcacctgaaaattaagtggtttgaaataatgagtatttgtagttgttcacaaacctgtgggtcagctgggcggtgctgcagatctgaaccaggtgtggctgatcttgaatgggctctttcctgctgcggaaggcagccagcaaggtaggtgggggctgatggtcagggatggcctcactcctatgttttcccattggctgactatcagccagggctgcagtgatgactggtgaaatagtttggatatttgtccactctaaatctcatgatgaaacttgatccctacagttataggtggggcttaataggaggtgtgtgggtcatgggggcagatctatgatagatggcttggtgccattctggcaggatccagtgagttctcactcttagttcttgagagatctggctgtaaaaaagaacctggcaccttcctctcctctctttcttcctttctgtctggccatatgatgcctgctaccctttaccttccaccatgagtagaagtttcctggccgggcacggtggctcacgcctgtaatcctaacacttagaggccgaggcaggtggatcacctgaggtcacgagttcaagaccagcttggccaacctggtgaaaccctgtctgtactaaaaatacaaaaattagttgggcatggtggcgggcacctgtaatcccagctactcaggaggctgaggcaggagaattacttgaacccgggaggcagaggttgcagtgagccgagattgtgccattgcactccagcctgagcaacagagcgagactccatctgaaaacaaaacaaaacaaaacaaaaaaaacctccatgcttcttgtatagcctgtagaactatgagccaaataaacttattttctttataaattgccctgccacaggtatttcttcataacaacgcaaatgaactaagacaacaagtctctgtgttctccttcatctatcatactacccgaggtttgtttacgtggtaaagacaaggttcggagagaaatggttgaaaccagcatagcttcttgagacacaatgacacttatgccacatgctattggccagagcaagtcacagaacatctggattcaagaggagggaaatggattccacaccttgatggaggagatgcaaagtcatatcacttgggacatggatacagggaggggtgcaatttgggatgtttttgcaattaacctaccacaggcttaaggaggcttttaggatttaccttctgctctaatgagtttcaaccaccatggcttagagaacatttcttaaaactcagtcatctttcatgtatccattgttctccaaagggactaagttttgttccatggtcagtcttttccatgtgttcttggaccttatacaaaacccaagcctggaattacagcacctggatttattcatcaagcattcgccagttcctggttctatgcatgtgttcacaaaactcagaacagggcattcctctgaatagagaagaaaaatagagtcagtcagaaaagaaattttttgtctaagaatacaatccaccgtactaccaccagacttggttccctttcaatgtcgagagtaacacattccttttatgtgttgcttaatttgcttgttttaagcagttccttgtttttggagtgtcttttttgataacattgagataccacatccactgatcatgtctaaaagctgacaatttctgaaggaaataaactgttcaaaattaactactctctcactatatatatagcattgtattttcagtacacatttttggtacacatattcgtggtacatattttccagctggcttgtgctaatgtactagtgattagaaccaagactaagaaaaaagtgcattgccattttcaatcaacgtgggtagagctgaatggttgattccaaatcaagttattttgcctaaagcaagacagataggagagagagagagagagagataatacagagatagataatcacaaactgccatttagagaaaatcattactactatcaattataagagtgattagcaagtttatggatagcatgatggctagcaatctttatacaaatgtggctgattttcactaagtcttttaattctcagaattgtttcatgacttttttggagaaaattgttgaggcatgaaaagaatttcatgactgagatagatattgtaccttaggaaatataaaatttaacaaatctgtagaaaaggaagacttaggctttgactttaaaagcccattccacttacaagatttcattttttgtttattcaatttggaaagcacattttcttatataatcaataagaagatttttatggcatgctcgagtgtagtctgattccaggtctcataattcctttgcactcaaaaaaggaactttgttacatcttgccactcatgctcactcttcagtgggcaaagtgactttgccatactgtcaccatccttgagccactgcccggtccttgaaaactaggattcttcatttccttttgcatcgtcagcgtgaggaaggggagggggaggtaagattctggacagctggactgaaaacaatggaaaatccctagtaacagcttgaatcactcactagcaggaggaaaatgtgactcgtttcttttcctctttagcttttgttgatttttttcataatgagctcagaaagagggaaagatcaatattcatgttgagttggtatccatcatagtgatattcagtgattataactctccaattctcactaggacaaatataaccacgcaaactggctaactgcacttgctggcatggttcctttggaaactcctggatttctctgaattacaaacagaaggagagttatagattttgtctctttaattttctgtctcttgaaatctcagatcacaaaaattgagtctttcttaactggtgatttcttattcgtcaatgactccttaaaagatatgcagaaagtaatggccctctaacccttcacctttgtaagctctttaatcctgaggggatggacttcctgatttctgttctctcagattctaaggaggaaaagactagctgttgtctctcaagtctacctattgctgtcctacagagcaaggacccctcttgttctccagctcctcaggaataggattcttggttccctaactctaaaataggagctcacaaggttattgtcaaggacaaatgagggcagtgttaacgtattaaaaaaaaaaaactagtcagagattgcttgattttcaaacttgatagtatgctttcgaagttacataatcaaaattatagttgtatttaaaatgttaagttcagcttacaaaccttcttaacctatttgtaagtcaagcaaattttaaaaatccttcttaagggaagcttgattaatgatttcttctcattttcaaatgtagttaaacatttttaaacacttaaagcttgatttgtaaatttaatacatttaattttaagtactttagcttgtctaacttaacaaatgagatactcatgaatatttgaatagctcatcaattagatacttataaatatgaaatatagtttttaagttcttttaaagttctcaatgtacttgtaaacttgtaaggatttcaggtcaaaacgataagtttaaatcatttactcgatttaacattttaaattggaagcacaattctaattcactattattttaataggccaaaatatcttaaaattacaagtatataaaatatcagggccaggcacagtggctcatgcctgtaatctcagtgcttttggaggtgaagccaggagaatcactcaaagccaggagtttgagcccagcctgagcaacacaggaggaccctgtctctacaaaaaatacagaaattagccagaggtggtggcatgcacctgtagtcctagctatttgggaggctaaggcagaaggataccttgagcccaggagtttggggctgcagtgagctgtgatcacaccactgctctccagcttgggtgatacatcaaaactctgtgtctataaagataataaaataaaaatatgactaatgcaaaattatttgatactatgggtttcatttcatacagtcatatgaaatgaaataattatgtatacaattatatatatatacatatatatagagagagggtgtaaatatataatttattcttaatgctcaatcttatcagagctgaaagatggttacccatgaaggaatcaatgacaccatttcacatatgattgcagttaccattcccttgtagttgctgggctagctctctcagctttccgagatttttttgaggctcagaggacctcctctcctgaatgagaactgggttctaacgaatgaccctaactgtgccctgttacagtggctctgtcttatgcccacgtgaagtgatgtcacagaccatattcacgatatcgaagctacacattactaaaccttctgccgacccacagaagcccaaaactcccatcctcatagtcatatcaatggattagattttattatatttgctgcaaactctttttataatgttcttcctactcaccttattcttatgtctattctattgagatctaattaaattatgaatgtctcttaagactctatctggctttatagtgacaacatcaaaggatatttgtattagttagggttctgcagagacacaggatgtgtgtgtgtgtgtgtgtgcatgcatttgtgtgtgtgtacacaagtcccaagatgtacaggttatgttggcaagccaggagaaccaatggtgtagttcccgtatgaaagccagcaggctccatacccaggaagagctgacatttcagttccagtccaaagtcaggaaaaagccaatgtcccagtttgaatacaatcaggaaggagaagttctttcttattcaggggaaggtcgccattttgttctcttcgtgtcttcaactgactagatgagatccagttacatgaggtagggcaatctgttttagtcaatttatatttaaatgttaatctaatctaaagccaccctcacagaaacaccagaataatgcttgaccaaatgttgggtctcctcataacatacaaagttagccatcacgatattttcctggcatacactgtgaaaccactgacctggaaccctctgacttctgtcagctatttaatagataagtctttctaatcttgagtgtttgtaaagcagttggatataaatttgaaaatttttaaatgaaacgataaatcatgtgtgacctcttgagcctattaatcctaaagtaaaaagtccttgtacaaatttttatccactttttttttttttttttttttttgagacagagtctcgctgtgttgcccatgctggagtgcagtggcaagatctcggctcactgcaacctccacctcctgggttcaagtgattcccctgcctcagccttcctctcaagtagctaggactacaggtgcacaccaccactcccggctaatttgttcgtatttttagtagaaatggggtttcaccatgttggccaggctggtcttgagctcctgacctcaagtgatctgctggcctctgcctcccatagtgctgagattattgctatccactcttgatactgtttggcatgtgacttaaaacaagcaacagttgaaaatataaactagaaaatgagcatatatgttcattgttgctaaaggcttggtaccagcaccagctacaggagtttatagcataccttctcagagaaaggcctcttcattctgggtttagaggtgttggtatcctctgttgcaagatgttattcaatcaattcaatcctgagttttcaacatcagcaacattacatgtgcatttacaggaagaagaccagagtaggaacactttcattttttcccccaaccatctacaaaaatgaagattacctgaaatgtttactttatactatgatcttaaaactatttattttaataatatctatataacccagatcaagaaaaccagtgaaaattagcctattcaatcctttcaaaaggcttttttattccaaaagattgaataaaattagttactccctttatcctgaatttcactacaaatattacatttgcaaatgtcccatctgactgtaataaatgccagtgactttaactctgtggttggtgatatgaagaaaaccatatgtgatagattctaaatatataaccacaaaagccaaactgacggtttggaacatctcagcaactattattgattactacagttgaagaggttgaatcagtttgcatggcaattctcctcctcttcttcctcccatacccactcctcctctttcttatttttctctcttgctctctctctctgttctccattcgttgtttctttctaattcgcagtagcagtagcagcaaccagaaaaatatttgagaactttaaactaaatggttaactaataaggcaataaatagaaggtgtgacactgaacgaggagtaaaagccaatgcattccactacattgagagacatttatgaagtatattgagttacacagacactaacattcagaaacaataaaatagagacagtgtaaaaggctaaaaatgggctgggctcggtggctcacgcctgtaatcccagcaccttgggaggccaaggcaggctgatcacgaggtcaggaatttgagaccagcctgaccaatatggtgaaaccccgtctctactaaaaatacaaaaattagccaggtgtggtggcacacgcctttaatcccagctactcaggaggctgaggcaggagaatcgcttgaacctgggaggcagagtttgcagtgagccaagatcatgccactgcactccagcctgggcaacagagtgagactacgtctaaaatataaaataaaataaaataaaataaagactaaaaatggcccccaaaagatatcaggttaaatccctggaacctgtgattgttccgttatatgataaaatatatgatttagttaaggatccccagaggaggagcttaatctaaattatgaatgtagtaaatgcaatcacatgggttcttctaagagagacagggggtgttttgagatagacacacagggaaggcaatgcaaaaatggagcagaaggggttatagctaaaaggaatgccaagggccaccagagctgtgagaggcaaggaacagatttttccctggagcctccggaggaagcaggccatgctgacacattgattttgtccttctggcccccagatctaagaatatatttctgttgtgttaagccagcaggtttgtagccatttagcagccacagaatactaatatggacaatgatttctgagaaaataaaaagattattttgagaaaataacaacattccttgtttgatttttaggaaaagccattttattttaatttttttctatttttttatttttattttttacattgaggttctctttattttttactatttcttttttcttttcttcttctttttttttttttttttttgagatggagtttcactctgtcgcccaggctggagagcaatggtgctatctcagctcactgcaacatctgcttcccgggttcaagcaatttcccacctcagcctcccaagcagctgggattacaggcaactgctatcatgcccagctaatttttgtatttttgtagaaatggagtttcaccatgttggccaggctggtcttgaactccttacctcaggttatcagcccacctgggcctcccaaactgcttggattacaggcatgagctacagtgcacagcctatttctgactatttcttgacggccatccatgctgggggaacaccctcatgtgcctgtcaagcccaaatcccactctaaaaattcagattcccttttctgactccgtaggatgcctgtccacggaggtctcataaatccccaagcccacattttccccaagtcctccccctgctggttacctttcctttcccactcacatggagcaggtgtccgaaacaatgggttttgggcagaaaacgcattttagtcaactgttgtataaatattctaaactagtaattaagattttaagcatgtgctctggctggtcatggtggtcagattgcaaacagttggcaatcttatttcagcagtagactagaatctggtcataatttatccaagggaaaaaagacttgtcattaaattctctccaacggtcctaaaattttaatttatccacgcctaccttgtccattactgttttaaaacagctttttaaacgtctagattccagccctgtgtagaatcaaatatattagaacttagtcttgttacttggtctgaattggaaacatttccagtgcctaccagttgcacacatcattatccactcataattagttgtttaatctgaaaagagcaagttctgctccatcacctaacatctgttcacttttactcttagctctgttcaaccaaatcccattattgtcaggagaggctctggcagacttgtatcatttacgaatggtttctatttctttgtagatttctaattctttgttctcgtagctgctacattctctgataataaataacattatgcagttatttttcggaacttgtgcttgttttcaaaataacaagactaagaactaaagatttatttgtctgaagtcacacagtgcctcaaaacatatctcaaacactaaaaatattaacatccacaaactaacacctacttataaaaactctagcaattctgagagaaatggattatttacaatcctctctctgctgatgttactgttaaatgtcatattaactcccagttatactgaaaccattttaaatgttatagtactttgaccttggttgtgaaaataaagtgtctagtgtaattatttagggatagtatagttcctaattaagacaaaattttcagcaaagatgattaaaatttgataagcttttaaatttttgtgtaatttctccaaataatgaaatgatttctttttctaaaaaaatctataaatttccagactgaaatatgcatgtcagaataaaggaaaattttattatggatctgaagtttgctccattttataacacatctagaaaatttggggtactggcagagtgaacccacagaagagattctgatgaaactgaaagtggattggtaggaaaattgctttacaataatctctactacttgcttttcatgtaggggtttgggaattagtctcttatttctacaactttctatttaactgaaaagacctaacatcttataataggattacactttctggtagaattttcatgatacaattcatttaaactatgttctttgcatgttctgatgaagacatttcctatgatggcattttggtctttctatctccagggaagtcaagtgattggaaagaattttaaagagacttgggctgagtgcagtggctcacgcctgtaatcccagcactttgggaggcccaggcaggtggatcacgggtcaggagttagagaccagcctggccaacatggtagaacctcgtctttactaaagatacaaaaaattagccaggcagggtggcaggagaatactcaggaggccgaggcaggggaattgcttgaacccgggaggcggaggttgcagtgagccaagatcgcgccattgcactccagcctgggtgacagggcaagactaggtctcaaggaaaaaaaaaaaaaaaagagagagagagagacttgatggttttctcttgaaaaaataatctcttagccattttccactgccacgagtacatgtacattgaaattagtgatactgaatttatcattggcaagatatctaaataagatttactgtagattaccagcgcattaaggagctcctggacaaaacatgtgcacattttctggctgagaagtgcagtcattgaagatttgtagaccagaacataacatattgaaccccatatctatctatatgccagtgtgtgtacttacatattaatttctcctatgaaagaggaattaataggaaaagaaaagcaaggaagtaatgttcaaaacttccttaatggccaggtgcggtggctcacgcctgtaaccccagccctttggggggctgagaggggtggatcacctgaggtcaggagttcaagaccagctgaggtcaggagttccagaccatcctggccaaactagtgaaacctcgtctctactgaaaatacaaaaattagctaggcatggtgtcaggtgcctgtaatcccaactacttgggaggctggcacaggagaatcgcttaaacctggaaagtggaggttgcaatgagccaagatcctgtgccatggcactccagcctgggcgacaagagtgaaactttgtcccaaaaaaaaaaaaaaaaagcttccttaaaaacaaaaaaagcttatgttgccattatttgggctattgatttttttctagtgcaaaacatatacatatttgatatataaccttggaaaatacacaaaagacaataacaaaacactcaaagtcctgctatctaaaaataaacactttgcttctagagttacttttattcatatttttaaaacatatttataggccgggtgtggtggttcatgcctgtaatcccaacactttgggaggccaaggcgggtggatcacaaggtcaagagatcgaaaccatcctggccaacatgatgaaacccccactctactaaaaatacaaaaattagctgggcgtggtggcccgcacctgtagtcccaactactccggaagctgaggcaggagaatcgcttgaaaccaggaggcggaggttgcagtgagccaagatcgcgccactgcactccagcctggtgacagaatgagacgctgtctcaaagaaaaaaaaattatatttataattatagtgagtattccatttctgtgtcctgcctttttgtatttatctaaaatttaatttaaaaatttctagatttctctgtaaaatcctgggaaaatcaaggcaagttcatagtgatctatgagtaatctattgaaatagcttggcattacataaaagcaatcccttcaggtctgaataaaaccataaatagaattttccttttggcatttacttcattttagactcatttaaatagtaggtttatcaatgcagtttattctgagcagagggatgatgtaatgtataatcagttactcaagtcaaaatgccaggaaagtatatgaataggtagcaacaaggtattgggttgaaaagaaaatgcttggctggctcttagatggcttgccctttagttgctactttccttggaccctttccagggtctccaagcatgaaggacccatctctcaggaagaagtccttgcccagggctgtttatcttagttgagtacagccaagtacaaaccagagcgaagttgggtcttgatctcctattgggtgccactgtctctgctttcttttatggctaacaagcctatactaccacaagccacatttcatttgatagcatgggtagtggaagagagcatccaaagccagtcaatcctaaatcatgtctgcaaaaatatctgtaaggataaggcctggtggacctcaagaactgtctccctctagtaataatcatataacattattattttgcagtgaaaaattatccagtacacaagcagtctatgcaatgtaatgagaagaatgctttgcaactgtactactagaagcgaactaattcatgatttatttttaagtgattagaacccttagtttatctgtgagaacatcacttaaataaaatgttttaaaatatgcaatgcatatgcaatagcattaaagtattaaatagcatcttaaagagcaaaagaaactattaagaataattaagtggatttattggctaattggtgtttccacatgtagttatttctgcaattattattcatttgctgatttacatagagctattctctaaaattactctggcattaaatgaagttagaagacatctccagtttggaaaatctattaagcaaatccttttcaacttaaagttgaggtgatactgaatcaaggcctggcagaactgactacagactcagagggagtatgtttattgcttttaattcttcctatttctgtttgaactaacatggcaaaggctttcatcttccaaactacacttatccagtctataaaacaaagatgatattgtttcaactataaagcacagattaactttgggaggctgaggcaggcagatcaccagaggtcgggagttcgagactagcttgaccaacatggaggagccccgtctttactaaaaatacaaaataaccgtgtgtggcggtgaatgcctgtaatcctagctactcgaaaggctgaggcaggagaatcgcttgaacccaggaggcggaggttgcagtgagccgagactgcaccattgcactccatcctgggcaacaagagcgaaactcagtctcaaaaaaaaaaaaaaaagaaaagaaaagaaaaagatcgggtgcgggggctcacgcctgtaatcccagcactttgggaggccaaggcgggcggatcatgaggtcaagagatcaagaacatcctgaccaacattgtgaaaccccgtctctactaaaaacacaaaaattagctggggatggtggcatgtacctgtagtcccagctactcaggaggctgaggcaggagaattgcttgaaccagggagtcagaggttgcagtgagccaagatggtgccaatgcactccagcctggggacaaagttagactctatctcaaaaaaaaaaaaaaaaaaaaaaagaaagaaataaaaagcaaatactaccaaattcttacctaccagagttacgactgctataacccttaacatttaaacaagggaaatcatcatttgggaattgtatttcctcttcatacaaactagtcttccatggtaatagattggctggatgtttttccagtatgttttctagataaatagtccttggagccattgtttccctaagaattaccaaaaaaataaaaacagaaagcaaaaacatgtttgctttctgctggaacatacatctcaggcagtgccgaggactaaagataaatttgatacctatggaggaatacattctaaaaataagattttatatctgtttgcatgttaacaaaacttatttgtaaagacacacattctagaaagtaacctcaaaagtactcttataaagcacctcattttgaaagtcaagtagagcaattcctgggcagatgataatgatactgcagagacatgtgaagaaggaaaaaaaataataatttcgctccctgtgttagtctgttctcatgctgctaatgaagacatacccaagactgggcaatttataaagcaaaagagatttaatggactcacagttccacatggctggggaggcctcacaattatggtagaaagcaaaggaggcgcaaaggcacatcttacatagaggcagtcaagagggcatgtgcagaggaactgccctttatcaaaccaccagatctcgtgatacttattcactatcacgagaacaggatgggaaaaacccactgccatgattgaattcccttccactgggtccctcctgtgacacgtgtggattatgggagctggaattagagatgagatttgggtggggaaacagccaaaccatatcactccctaagactattacatttcagcagttagatgaagagagaaggacagggttcagattgaatcattttggatggaggagaacatataaataattgaacaataggagcaccacctagtttagagacaacctaccacaggcaaatacctcacatgacttcattgttctcccccacaccttctctaccatcagatttcacccagaaccctcatgtgccacagaacttcaagtaaataccagccctggaatactagtcagaaagctgaaaaaaacgtgcaatatgagtttgaacactctgagatcgttaacacttttttcaataaggttagataactaagatgataaataaaaatattttaaaacattaataaagaggaaatgattctcatagaattagtatagccaaattttatcttcttaattgttgtatttcatcaagagacatagataggattaattttggttttctactataactgcttccatcagggaaaatagattaatttctaaaataccaccagaatcttagagttgtttatccaagaatctctaaagacactttacattgcagagtaagtcaataacatgggcaaatataaagctagggaacatgtgaaaaataaaattatgagttacaaacattaaacattatttcagtagaaacagattggtggctgcagttgattattaaagaatgccattaagttgtcaggaataactgttgtagttttctgaaaatagtcattttgttgtagctttagattggattagctagagctatacacacgagagatgcacatcaggccttagacacaaattccttcaggaaaatgattcactggctatttagggggttgacagccagtatatgttgttttcgagtcacagagaaaattgtatggttgtatattctgctttaatttacatcaatggaagatgagctacaaagcagctattgatacaaaaggcaaacccattgtagaaaatgaacattttctgtaagctacatctacattcttcctgatcagaaaataatacagaaagtgacatacttgttcctttttcacatttgaagaaaatgttacaaatgcctccatgatgcaattctgtatttagacaatctaagcattgagtcttgggatacttattctgtaactattttctaagaataacctgaatagaaaacatggaatttggtagtaaaagatataaataatgaaaataggggtagggtcctgtgcctcagtgaagtttaaaatttaattgaacttctaaataaatgtttaaaaatagagcagtttcaaaaatacaaaagctagaatattcatagacccctgaagatacttctacagtatcccacagttccacaatctctgattcaggaaattacattaaaagttatatgttggcattttggaatttcatttggtatacatacctgcagacagaggcaataaaatcacatcaatggtcggttacaaatgaagtcatccagttgacccagggtatgctttggctaaattttgttttagatttgccctaaaatataattgcaatattgaatatctctaatagatctcaagggccctctattagtccattttcgtgctgctgataaagacatacccaagactggacaatttacaaaagaaagaggtttattggagttacagttccacacggctggggaggcctcacaatcatggtgaaagtcaaggaggagcaaatcacatcttaggtggatggcagcaggcaaaaagagagcttgtgcagagaaacctccattttgaaaaccatcagatctcgtgagactcattcgctatcatgagaacagtgcaggaaagaccggcctgcataattccatcagctcccacgggttcctcccacaacacgtaagaactgtggagttacacttcaacatgagatttgggtggggacacagccaaaccatatcaggcccactttgcaaaatatcaaaacagaggggaaaagtataagtaactgaagagaagggtgcggtgtgctgaatacaaagatgctgactggggggagtgaatgtacctgcatcccaatttgcctgggaggtctggttttacccattgtctgacattctgtctaatttagcatttgtcctgaatatttcatttagtgatgtattattgttattagttgcattaaaacaagccaagatggattaggtagacctccacgttgtacttccagtttcgtcatgttatggtcttgggggtgcaggaattcccaggtttccttgaggtgaaatctgaaagctgagaaatatagcacagctcacaaggaagaagtggataaaacagtgtcctcagagcagccagggaatcctaacccctgacgatcttcagtgaggcatttggtactccaacctgttgtgccttagccctgagccccagtctgtgaggtgcatatggtcctagctaataggtcagtgggaaaagggagaaataataaacgaggctgtgtgtaaacttacgtgtaggaaacaggttaagctgttctgccctgttgcatgcagagagtagtctgaatgctattgccacagtggttttatttttattgtgtgatgtaaccatatgccaatttttttctttgactattgactcactattttataatgcatccttctggcaataatgaaataaaaattagtaaacagaagtaactgtttaatgaaaatgaagtatttgtatttctatttatcaagaaagaaaagacgaacctgtggcatgcagagagtagtctgaatgctattgccacagtggttttatttttattgtgtgatgtaaccatatgccaatttttttctttgactattgactcactattttataatgcatccttctggcaataatgaaataaaaattagtaaacagaagtaactgtttaatgaaaatgaagtatttgtatttctatttatcaagaaagaaaagacgaacctgtggccgagcacgggggctcacgcctgtaatcctagcactttcggaggccgaggagggcggatcacctgaggtcaggagttcgagaccagcctggccaacgtggtaaagccctgtctctgctaaaaatacaaaaattagccgggcgtggtggctgatgcctgtaatcccagctactcagaaggctgaggcaggagaatcacttgaacccgggaggcagaacttgcagtgagccagattgcaccattgcactccagcttggggcagaaagaagagaaactcagtctccaaaaaaaaaaaaaaaaaaaaaaagagaaaagaaagaaaagaaaagatgaacatgtaacttacacaaaacacttgttgccatttaccatggggatataatgaactaacattcagaagtcacacatatgctgaagaagcatcaggatctacttcaaaagttaaaaacattaaaaaaaaacacagaaaaaaagagtgcatcttaaaatgacttaacacacacaactgcagaaggtggagctacagaacatgcttggaagcacgactttttatttagatcagatgattgttctttgacattaagttagctcattggcaatttcatgatttcttgtgcatatcccaaaatgaaatgacacctgttaaagtgccagcaccgttagcaaaagaacatttaaaacagaaagtggtgccagttttatttcaatgtcatcagatgttccaaacagaaaatcactccagttaattcttgtaatggtttcgttttctcatccaattccgaggaagaaactaaagctttttgaaattaattctgttgaatgtattattcatactattttaaattcagttaatatttagcctacatttctagcatttgtctaatattaacacagtttttggtggagtactgcatcatgaagaaacctaacactctgaaatttaaagatacgaaatttacttggaaatagtttttatgtacatataattcatacttacatccaaataaatgttgatagtctctcaattaaaataaaagctgtaagtttcaaatttttgaaataggtacatatacaattggatcatctgaactgtgaaattttgttaggaaggtaatgttgactacaaaaaaaactcagaatatcaggattcactttttctctctgctgcctttcttcggttggattttagaaacgttcatgagtgtttaatcttctgtgcttttaaaattcttctgagtgtcttaaaatagtactgaagttttcatgacagtcttttcatttttggctgaatattgttttaaaatcatctagaaatctttcatcaaagtaccagtgaatggaacagcaaaagctaaagatttcaaagcttttatcaaaatgcgattttcgcaaacaaattatgaaaataggaaggcatggatatgtatctgcaaaggcaagggagaaactaaagaattgtagaataaagctcaaatattataaaatatgtaatttgaaaactccaattgtgttttgaaatattcagtttgtgggaataatagtttgatgaagtttcaatttttaattaaataaatttatatagagcagatataatgaaattgaagacttagtaaaactttcaaaaaaatcctaaagacagtttatttgatgatttttgacttttaaatatttgttaatgaaaagtattcttagtaaaaaaaatataaaatatttgggctgaaatatttaatataaataattgaattgaaaatattttctgtttagcacaagctctgagcttgttaagtaccttgtgcctgtgggagaagctagtctttaaaagtttaaatattggccaggtgtggttgtctcacacctgtaatcccaggcgtgattaatttgggaggctgaagcaggcagatcacttaaggacaggagttcaagaccagcctggccaacaggagaaaccccgtctctactaaaaatacaaaaattagctggtcatggtagcccacacctgtaatcctagctactagagaggctgagaatctcttgaacccaggaggcggaggttacagtgagccaagaacatgccactgcactccagcctgggcgacagagagagactctgtctccaataaatacataaaaataaaaataaaaatttaaatattattgattaaagataagaatgaattagttttgtcactaatttcatacatattaaccatatcatgccactttgaagaagattgtaggtaatttatgaaaaatgttcaaataagactgtatttttttaaatacttttcttagaaaaatactagtgatatactattaaagacagataaaactttaaaaaattgattaaagtacttgcattctacttattttaatgttcagattgattttatgaagaatttttgcgttagtgaatgaagctttgtgttattttatattttagaaataattctagcatagcatagaatattttataggtatacgaatataataaaaccagaatgttgttcaccagacgaattcttcaaaaaaaaatacaatcttcacttttagtctactttcttactctcaaaagtatcctaattagtctagtgctgaagagtttcaaactcatttaaagagaagtagacaaataagtgacaggaaggattgccgtgtgtatcttccagtctggggtgatgtttaaattcctcagagtccacttagctttgtctcttcaccagccttggtttgccccagtgctgttcatcattttaacaaaaatagatctcacaggatgttcacccagtcacctttttgtagggacaagctttatagtcctagcacttgctgattctttaaatactgtgctttggtccaggggatgttaccttaagcccattttttgtagttagtaaataagacttcttcccaaagtcacgtgcatgttcaagttcttgcattgccagtgtgtaatggataaagacaaatgtatagtaaaaaaatcatgaggcagtctttggttctcatcccagccctgttggctgtgtgatatttggcaaattattttacttctctgagcctcttttctttccattgtaaaatacagagaatgatagttaagagtatttttgtggaaatgaaccaacacaatgcagctcaagtatcttagcagagtgcctgtgttcaataaatattaataaaatgacccttaactcccctcagcaagtttaaaaacaggaagtttccatttcaccatttactttccaattctttgttaaagatggccataataagtaatgagagtgtgcatttgtaaatgtctgtcaccaatgtgaatttacttgagatgactcaaaccacattctatactggaaaaggtgcatttaacgggcaaaagaaaagcccaggccagtttctttctgtatcaaccctgggtaaatctccttaagaaaaaattaacaatcatgatttattcatagggaaagaatttaactacttgttagcattcgaatgggtcctaaggaaactcccaagttaattaaatcagaactttcttcttgagtttgatccattatagtgagttaccagctgggtatcaactgctttcccagaaaggccccattgaaattaatggactcagggctttgttgagtctggacactagagaattggacaaatgacactgtggtttattaaagaattatgactgcaaatacattatatgatgctttctccctctctctccatttaattatgaatctgcctctcaaaagccttgactctgtattttaaagttgacataaatggtaggacgaggttactttttccagtaatggagaaaggaggagaaaggttgctccgaattttgtgatcttgttcattttccgatgaagtttttttgctggtccaaatattaattaatcgattgattgaaaatgctacaaaagaggagccattcatcaaagaaccaaatccagtgattcgtgatctggggttttatcacttatatttctagagcatccttttgcttttacaacttaaatttaattgaaattttaatccctagcaggtttttaataatgggcagcttttgagacattaaaaaacattgctctcacttcccagataaggaggttgtccagatatccttatgctttagggagcatttactaagtgatggtacttcccagcgcacatttttggttttgttaaagtatcttaaaccgcccatgtgtagtcaacttccccttatggaatccattgataaatcatggcaaaaggaaaccactctatggaaataacgtctaaaggagaccctctttatcccggagaggaaaaccagagagcagtcacaatctggctaacataaaaagaaccactccttgatgcaaatcaaaagactagatgtagctaattagacatgggaaaagggtggttctcctgaaaatctggggcctcaggcattttctggaatgtgtacagtcagaacgtgcaagttagtcagcaaagagaaaacaagcagccacacctctcccaaataccgaatagtcatccttcttttgtggttcagaggtgtttgtttgtcttagaatgctgcaacttaaaaccaattgattttaaataaaaatggtaacattataaagtgtgaaagtgtggggttaggaatcatttcccaccctgtgaaaatggctctatggtcacccaggggtttgtgtgtgtgtgtgtgtgtgtgtgtgtgtgtgtgtgtgtttgtgtgtttaacctgtgagataagaatggtcaaccagttgactcctcaagaacagtctagattgctacaggcatgaagttgctttgagagcaggttgaatgcccacacatgtaggtttggtagaggtggtggtgaaagcggtgagcatggctgcagggtactcatgccactcactcctttttgttacctctcacaacctctctctgtctccatctgacatgcctccctagactgtctctaataccattagaaacttcagcgcaaattgtgcaacctctccgacactgaccacaaaccctttccagcctcagaaatgttcatagatagatgagggttatcagggttgctcagccagtgaactccgaccacgctgggtgaggctacatttgtaatctgttctggaaaacgggaaccatgctccattttcaacctgcactcacccactcctatttctttctagggtgtctctgtttttttgcttttaaccttgggtttgactttttccagtggacatttctaactaggaaacttgatggtttccacttagattcccttattctccaacttaataaacatcaatacatttagaatccttcgctttccaagactctaactgatttgtggccacagtgatctttaaaattcattagactttcgtcattccattttctttattaaggcatccatatgagctgccatgtgtttgctctctttcatatatctgaatttactgattgttgtctccaaaacatgttctatcttagacactatctcatcctcttctctgccagatattgattattcatacattctctgatcccaaccaccagctttactcattgttatgtctttgtagctttttcttcccttaaatacaaggacaacctattatttccacaattcagcactttttactgggtcttttacctctctaaacccaacaagagcatcaaagcatgatgttgggcttggtgcctctcttccaccattctttctctttttaactccacatgtgtgctggactcttgcttatgatcttccctgtgtagctaccaccacaaaaatgtgtccccggcctttacaaatgaagtgttcagatgcaagccattctcttatagacatggcagtaaagaccaattaaaaaagggggaaaattggtgctacaatgtcactttgcgggagaatgatgtctgtaaagtgggagcctatgtcttgcaatatgctgatgccctggttgaatagaccaaactattcattccttcctctatggcctggggagatctctctccatcacacctcagtgaagacagctttgatgcatttgactgtggtgccttgggcctcccagttttcaatttttatttgtttttttctggtggctgccttcttgactgctgatgtgtagcttatgaaggagtgaaggatgtgccatcccaaaatatggcagattggtatattgagtatttcaagttgaaaacattggagacagtgtagtttcagaaaaggaagtctgacctgtctcttcctgcatgtagcacaccataaagattcctctgggaggggtacccttgccttaccagggcgagaaaatagcccttaattaccagagacttggaactggaggctacactggacctgatatatacacttaacaaagtaacgcttatgtgcctgtggttttacacccccccaccccaaatatctcctagtgactcccctagaaaatgtactgccctggccagattttctttttgctgtcatttcttctcaaatgtattatcattcattgtctaaaaaatataaaagccccttcttcagacttcactgtcttgtgaagatcttcatgtacacgtgaaattaatcaaatgtgtatacttttctcttgttaatctgcctggtgtcgatttggtttctaggtcctgctgaggagcccactaagagctaaaaggaggattgggggtgatcactggctctcctacagttatgccctattgttttttttctttaaataccttttccaacaactcgaagctcagcagtatggtggacttcctcccttgtgcatagatattgttgcatcatttctgtcttccagagaactacacttgctaagttcagaatactttatcagcttactttgtgtccttgttcccatggtggtgacaccgatcttgaagcttaaaaaatcccccaaattccgcctcccacctctgtgacactcttttgcaaaaatatgcaatttttctacacacatttctgacaaaaaggaaaaaaatgttaagtccaccctagttctgtccagacaagcacagagagaggcgtgttagatttccagacaaatattttcgcctagattttgctcaatgaacttgattcactgcagggctttttttcccacaagcgcgtggcagaggtgggctgccacaggagtggccagtgcccgctctctgcagggcactgctatgaatcaccattttcatgaatggaaagaataggaggaggggaaaaaggacaagcagcttgttgctaatgccctcaaacaaggcaaacattttgtgaataatttttagataatatatgacggtttggatctttggttttgttgttttgaatggaatgcatagaaaaaagaacttgtttcaacaaaagtttgatctgatatcctattcatgggctgattctttctcaaatatttggcagctcatccagggcacagaaaaggcacagtgttgaatcatgttgctttcaagctctgtatcagtggaaggcactggaagggattatcgatcccacaaaatacacaaggaaagtatgtgcccacttcatttctgaggaaatttagggttcagatggaccttgccatagactcagtgtctttagtagaggccaaataaataaataagccaacatagatgccaggcaacttaccatacagcatgctgaatttcttccctcatgtctggtgactggttttatagaacccattcagtgagaatgcaggagaagtctaagaattagaaggaacaaagaaaagagaatgagcacgggaataaaagtaaataataatcatgtctattcttgattctggggactggctaacttctgtcactttaaaccacttcacctcatttgaaagtccaggcttctcagcttgatgtccaaggttctccatgacacatatcttcttgagcacttcacttcatgccccgaccaagcttggacttcttccccctcacatgcttgctgtttcatgtttcatgttttagctcatgctgttccctctacctggaacatcttggttcactcaactaattctacccatcagaatttagcacaggtgtcctcctctcttcatggtcttcctaaatacctcttgggttcattattcctcttccatgttcatagatcaccctgggtattactctgtgctagcactttccttctttctgctatgtagtaccagtcaggcactcaggggaaacgactatgccattcactcattcagtcattcattcattcattcaacaaagacgtattggattactattatgttccaggcactgttttagggactgaagataaggtggtgaacaagacagataagattcctgttgtacaggagtatgcattctggcagggggatagattaaaagggaaatcaataagctaacacgttaagtgctaccgataagatgaaaatatgtcaatgggaagaagagtgcctgctgatttagactgggtggtcaggcaaagctttgccaaagagatggctgaagctgagagttcaaatgcaagaaggagtctatgaggatctgggcacggagtgtctgagttggaggaaatgcaagcacaaggccctagaggaagaatgagaactgtgagctcaaaaacctagaataagccatgtgactagtgaacagcatgtcccagcaaaagtcacacttagaaaatatagggcctgagggtcacaggaaaagttgtttattctttacctgatgggaaaccttgggacaattctaagcagggagttggaagacgtgatttatattttgcagaaatcaccaaggctctgcatgctgaatagattttttctttgcatccccagaacctagcacaatgcctgcctctgtttcagtagggcccagagccgtgctgcttttccacacaggaaaattgccttttccaaggtgcatggctgcccagtagagaggaaagctcaaagtcatatcaattcaacacgcagtactaagtctctcctcttgctccattttctactggcctgtgaccaactacttcctaaagttgaaattgcttccgatttcttttttctctatttcatggataatccatgcagtgtttgctcaacctgtttacactgagatgtgttgaggaactgtcccacggcaagaccacaaggtggggcagtaatgagtaattggaagaaaactgcggtaccttctaaagctcaaatgtggctttctagaacacgatgaagtggagccctacattcattatttgaccttgtttgtttttttttttttttttttttttgagacagaggagtctcactgtctcccagactggagtgcaatggcatgatctcggctcactgcatcctccgcctcctgggctcaagcgattctccagcctcagcctcctgagtagctgggactacaggcgcaagccaccatgcccagctaattttttttttttttttttttttttagtagagacgggatttcactatgttggccaggatggtctgaaactccggacctcaagtgctccacctgcctcggcctcccaaagtgctgggattacaggcatgagccaccatgcctagccctgtgactttttctcaagggcttcaaacagtccctctgcaagttaacctaggcatactcacagagcaagaaggcattcatgataccacaagggaggtgaggtttgtgccatttgctccatgtcactgaggcaggacagccctgtgtggctccattcccacgagagaccgtcttgctccgttaggactgcctcccacctgctaagggtgcttttcttccatggtacagtgatctttaatcatttgtttcaaaaatgtaccaacctcccgggaatgaaactaaccaaacttccctccctccctctctccttcccttccttccttccttccttccttccatccttcctgtttgccttccttccttccttttggattatgttgtttcattaaaatatatttagctgggcatagtggctcacacctgtaatcccagcactctgggaggcagaggtgggcagttcacttaaggtcaggagtttaagaccagcctggccaccatggtgaaaccctgtctctactaaaaatacaaaattagccgcgtgtggtggtggacgcctgtaatcccagctactcgggaggctgaggcaggagaattgcttgaacccaaaaaaagcagaggtttcagtgagctgagatcgtaccactgcactccagcctgggcaacagagtgagattccgtcatatatatattcacatgatttaggaaattctgtatttcagcatcacagtataaagacttaagttctaagagttgatattgctgtagatgttgggaatggaatcttaggagtaacctttaccggaggcaacttctactgcccttgctacctttggtgtgacctgaaaccccctttcttcattagtaccaagtgacttgtttgccactactcagctgtcccagaatagcttgactccacacatccatgcatttctaggaagaaattaggtgcattataaataacgagtcctctgaaaatgccgaagtgtcttaatcttttgaaaaaaattatctcaaatttacattcacaaggagccatgtcttttgccactaactgaaactcagtaacaacactgaagtatgagcttgggccttgtctgacaataaaaaggaaatgctaggtcccagggaccacttcaagatgtgcttgttcctttaaagcagggagttgtcacatccaatttttaacacatatgtatattttaacacatatgcatattttaacacacatatatatttctgattatactgtaaaactggtaaattatttttaaaacatcataaggcccccaaatcccagagaaagttgtttctattacaattttagtctatttgtctcttttaagtttctcttccctctgagcatatgtatctctaatgcatgtctgcttatgtaggcatatttatacatacaccctttcttttacaaaactgatatcaatttttgtattttaaataaaatacaaatgttttacattctttctaaacaagcagacactacttttggcacctcccaatgctggccaggtcatgttaactacccttaatcagctttttttcttgcaatatttgtaatatgcatcatctcagggcaagagacaaattagatcatttgaagattaataaatccttacctctgtttggttgcacttagccagcaaattcatcacatgcttagtctttgctttattctgggccatgtagactagctgttaagtggaaaaaaaaaaaattcttcttcggggcagagtggcaggatggctctttggaaagagtcttggagcaggagtcaaatggtctggctttacaccccagctatgcttacaaaagctgggtaacttgcagttcccttaccactaaagtggaaacatggatgtctaaagcttttttacagctagaaaagtctatgcttggttagcattgtgctgatgcaattctgttccagataaccgagggagggaatggcggtcctcgcgtgaagactaagtagacgtgctattaccctcctcggttggctccagcaataagcctaatgacctctacaaagctgttctgtaatacagaagtaaacacttactctgcacaatttctccttgcatgtgcttcccactggtagaacattattcatcttgttggtctttccaaagagattcattacttccttgctccttcttattcatccttcataatagaaatgctaaaagtctgaaagacgaggaagggagcacatttcctccctgcagtctgaggaatggctgtatctcttcatgagcaccaagaggaagcccccagatgggtccctgtccttacagccttgtttccatgtgcatttccaccccagcctcttccataatcgctccccatctctatgccccagcgatgccagttgttccatcaaacactgtcctctctgttctcagcctcggagcttctgctccctctgttaggggtgactgattctcaccaccaccaggctaattctgactgttctggtttcaccgcggatgtcacctcctccaagaagctcttctcgactttctgcctgcagaccctcatctaagctttcacaacaccctgtgttctgtgtttacacccacccaactttttcttttttaaattttattttaagttctgggatacatgtgcaggacgtgcaggtttgttacataggtaaacgtgtgccatggtgttttgctgcccctatcaacccttcacctagatattaagccccacacgcattagctgtttgtcatagtgctctccctctgcccacccccctgacaggtcctggtgtgtgttgttcccctccctgtgtccatgtgttctcattgttcagctcccacttatgagtgagaacatgctgagtttggttttctgttccttatgttagtttgctgaggatggtggcttccagcttcatccatgcaaagcactggatatcattcctttttatggctacatagtattctatggtatatatgtaccacattgtctatccagtctatcattaatgggcatttgggttggttccatgtctttgctattgtgaatagtgctgcaataaacatatgcacactcaccgaactttgcttcactgtctatcagaaaactgccagtttttcagttgcatttatctcctagaatataaaggctttgaatagatccaatggtcttgtttaccattgaatctgatacctaacatggaatctgacacctgctagacaccctcagaatgtctgtgaaatgatgtaactctacgtgatgtgtgtctactcatagctgtaaaatgagtgagccctcctgtaggtcacagtgtccagcagactggcagggacctgatatgaacatcacagaggaaaaaaacacatacgaaacaattaatgcttgccattgggccaaatgctttgtatgtgttatttcatttatatttttatttaatactaagcagacttcatgtaccctgtattttgctaggcagtggagtacatagaaaggaacagaaactgcgtatcttgtcttcccaactgaaaggagacgattaacctacttgaagatgttagaatacaaatacatgatatctgaggacagggtgaagaaaaacaaacaaataagaacatgaaaaactgtgtttgtcttgactattcaggatatgaaagtgccgcaacattcatgtatctagaaactccatgaaggaatctacacttagggcttaaagaatcctaagggaccgggcgcggtggctcacgcctgtaatcccaacacattgggaggccgaggtgggcagatcaggaagtccagagatcaagaccattctggccaacatggtgaaaccccatctctactaaaaatacaaaaattagctgggcttggtggcgcatgcctgtagtcccagctactcgggaggctgaggcaggagaatcgcttgaacctgggaggcggagggtgcagtgagccaagatcgtgccactgcactccagactggtgacagagggagactccatcaaaaaaaaaaaaaaaaaaagaatcctaaggattcctggttcctgacaggtgcttgttccttgaagtatacttgtgccgggaagcaaatcttctctctctcgttttgaacttggaggagacagcagctcccttctccttttcatacaggttattgtttataagagcaatgtgatgaaagcttcctctgctaagactgcaactccagcgttaccttttctttacctcaccttgatcctcggtgtgaaacttcactcattactgatgcattgcaattaacagatctcctctttcaagacacattagggtatgttctgactatcagctccaaaaaaataaaataaaataaaataaaataaaacacattaggaaatttaaatgaattagtgtaatcagctgagatagtacttgaaagggaccgtgtaggcttgtggtggaataggtactttcagacagaagtctctagaatattcctgaggaagtattttctcctgcccttcaatgaatagagtggtaaggtttgtgaaaagcaggcctctggcctgagttagggaaattatatattgtttgtccaaagtagtaaactctgtctaaaatgaaactctagactagatattattttttgatgttagatgtatacgttctctccatgatttagcagactttccagggaatgatgagtctcccctctactgaatactataaacatgttatctcagtgggaaaaatagaaagagatccagagaagaagagggaacatcttgcttttgaagcatctctgcttacgagtccataggaaataaattacatttcccagggttctgatttggtttttaataacttactggccctgctaaacaagacactcaggagaaagtgcatgtgaatagatggagatctacatttttagaaaatatgtttctttcttttgggatcacaatcagaacataggcatcattgaaacaaagccgaggaagaagaattttctcatgctatgcagaagttttctgttaaagatatcagaggctttgcaccctgagagctgtaatcttctctccttgagttcttcattgagatttactgcagaggcctcagatgtgtttatttctattatccagttgctcctaatattacttgcaattgttttggcatgagggttagaaattgcaagaactcctagctcgaaatcacagaacgtacacaaagacaaaacagaaataaagcagaacaaatgcaaggataaaatagataaaaatatctccccaccctaattgtgctcttttaaaggaatgctattgaaatgacaaatgaaggagatttctacctgttgttatatagctgggcagagtgacatttttggctgtattctagtgttgagcagttgcaaagctttctttccccctgaagcagtagagggtgctatgtggatataattgaagagatgctaagtttctatatgacgccagggcttagggactgccctctcttttcaagccacttgcttttcccaaaataactaagaaaagggagaaaaaaaatgagtacagaggccatgctagaagacatagataaaatattaagtcttaagaaaggtaggaaataatcagattctaaagttctcacaaggtttggtattttgaagtatttggcagaaggcaagggtatggaaaactttaagaaattgtaagcttaggactttatcgtaagcttaagacagagatgttatctgtctgaaaacagagggaaaattttgaacagagtgattcttgtaataagagaagacttttgacaagttatgaattccttgaatttcattattttttcttgctgtttaagtagtatatattgtatatttgatgacagtcagattttactgatagagatttgaaatatattttgatagggctacctcatgctttttgtagaatcaaacattttagagctgttcagccccttggagccattaagtacaatcttaatgtttttgcataaggagacattggcaccaagaagttaagtgacttaacctgtaacaggctggtccaaacatccgagcctcaactagaaccagtgtccttacccctggtccaaagctctctgtcttttgctaccctgctttgagttacagcattttatatgctgacaatacataatcctaatacatttatatattgttttcacttacaaagcagtttatgtacatttttccacacttatgtaccaaaacgtcctttgaaaatatgttatttgttgatttactcaaagaagacttgcccagttttatgacaggctgagaagttaagtctcctgttgcaattccgtttgcaattcagtatccattacacctggtcaatcaagtttcttattaatcccacgttttccctgcctgtaaactcccttcttagtgaccgattttgctattttgtgtgagcacttgagtaaaattcaactgactcagagtagggaatcctggctggattaatgggattgtgtaacaccttcatcacttgaggcccagataggagtgactgtgcgatgtaaaaaaggcttgccaacaccactgatgtttgacgtgaaggtgaaaagttcagtggcccagagaagtgctttaagggttcttcttaaatctaacacctgaggaacaccttcagattatccagcagttgtgatcccctatgcagtgtctatttgtctagacttcttccccaacacacattccctagtacatttaaatggaaagaaaggtctgggaggttatttgcaggggtgttgatggaaacaggacccatcacagctagggtcatgttatcagagtgcagattttgaattcctttctgcctttcctgcatgactttaagtaagaaaatggtcaccttaaatttgcccaataagactcagcttggaaatcattcttgggatgcagaaggatctggtccagaaagcttcagagaagccttgagaactgcctattcaagaggagaagaaggctgagagagggaacctgcaaagatctagcaggaaaagagtcttctatgtgcaaacaacactagaccctttcccagaattggggcactaacaaaagataatgcctctgaaatattgggaaaattgttggagaatatgatctcgttccctatgctgtcactccaggtaacacccatgatgctcaaaggatttttttaaattaaaaggagtaccactttatttaacaggtagaaaattatggaaattattataccaagaaaggacataggctaataacataaattaggcttaaggagagtttcataaattatgtatctccaatggattaatgaaggaaattaggaataatttttatattatctctacttttttacttatatatttggacttgaggttttctgcatataatatgcacactaatataaatattaatataatgctaatacaaaggaatactctctcagagattgtgcattaatgtatgtttcagtgacaaaatatagtgcgtgaccttagccccaggaggaagaataggatatgtgaaagaacctaagattttgaacccaggataacctggttttaagcccaggtctgctacttaagagctgtacgactgtgagcaagttattttaaattgctggatcttgttttcctcatttacaaaatagaaacactgatatctgcatcatacatcatactattgttatgatttttaaattaaaaatatatgccaatgaacctagcaattggtgaccatattgtaggtacttcatggatatctgcctcttccttccatgtgcaaaaggaattctggcatcatcttttataattactaggaattttttactgccttcagaaaatatttctagacttatcctgctaatttttgtttagaagttagcctctgtttcagtccattctctcattgctataaagaactacctgagactgggtaatttatagagaaaagaggtttaattggctcgtggttctacaagttgtactagaagcatggctggaaaggcctcaggaagcttacaatcatggcagaaggtgaagaggaagaagagaagtctcaaatgactgaagcaagaggaagagagcaataggggaggtgctacacacttttaaacaaccagatctcaggagaactcactcactatcacaagaaaagcaaggggaaatctgcccccatggttcaatcacctcccacagggcccctcctccaacactggggattacaattcgacctgagatttgggtggggacacaaatccaaaccatacagtccctgaatatatatgtgcagaaatagactgctcacctagacttcaaaagacatgtcatcattacgcacctctgagacattgtatggtcttggttttaaatttcttgagtaatctggttaattctgatactagcgatcaacagctttggtgtaaaggtaggtcagattggtgatatattgctacagcaatttgaggaaatcaatttcctccctaaaagttttgacaatcttgtttatttatatattttatggtggtgaggggagaaattattcttgagatcttgcttctttgaaatatggttcttctcaggaatatcctatgttattagatgatctaaaacactgtggcacttcttaaataaccaatacttaagataccatgaaaattacaacccccgtgagatatagtatcaattaaactatgccatatacctcgattggttgagttccatccactagtcaatttcaaaattacctcgtaaatcactaagacaataggaaagaaagccttactataacttgccttactataacttgtcttactcccaaatttagcaatatctttttagcttattgatggtatttcaggaaaatcaaatgtagttccacattataaggatggagacatgtgttacctctttatgttcctgtatggcaaattagttgatactctttggtcttgtcgacatctctttaaccttgtaagattataaaggttagaatcatgtttaccacctgtaaaaaaaaaaaaaatctgacagcagtgggttttttttttttcttcttcttctttttctccaccacatcccctgataatgatttccatgggctggaaatactgggaggagagaaatatttagttgaattcattttaaatgaaaccaatagcttcactagtgatctcataacctcaaagcactttacaaactgagtaatcattgaagatgctaaatatagtaaatacaatgtttaaaaccttcacaaataaatccatattaaagtcttattctaccacaaagtagctttgcttttgatataccttttaaagtcatggatttcttgatggagatattgagttgggttgttcctgttgctttttgtttctttgatttttttttttctattatataagctagacctcactctcttagtcatttcattatatgtagagacaagatgctgccttaactagagctttattccaggtgcccaaaggtcttcatttagttcctagctcaattcgtgagtaaatatttcttttccagctttaaaattttttaaatgacattgtcaggcacggtggtgcatacctgtatccccagctacttgggaacctgagatgggaagatcacttgagcctggcggttccagtctgtagtgcacagtgatcatgcctgtgaatggccactgtactccagcctggacaacatagcaagaccccatctctaaaaaaaaagaaaaaaaaagaatgatagcatttcctttacttgtggagattttctgactataacatgcacactattattataaaataatagactttacaaaatataatggttgtagtttcatttgcactaaataacgataaaccttatttaagtgcaaccttattttatatatatatatatatatatacccattaatttgattgtttttaatgtagccatggacatggagagttcacaaattataatttataaatgtattaagatagaataattgcagaatagaaggatttttaaacaatttaaatagtcaccatttctgccacccattaatcctatatattggttctaggacttattcctggagttatatcctgcacattggcttcaggcatgaaggacttgatcccacatcttctccagtgggattgtggagatcgtgtcactgctggcctgtcctgcaggctcttgtggtgatcattataaaagccagccctggggtagctcaggacaggaaaggaaggatattctgaaatgattttctccttttagttaacacattttggttccagaacactgagcaaatcatcaactgaagccccatgatatattttcaaagagtgaatttctcttacctgactgaggcattttattctataatagcaattctctgggttttttttttttcatacttataacaaagcggattaatatatactcacctaagacaccaaagatactgatggctttcaccactctatctaagcaggagtaaacacctgggaactagaaatctgagaaagaggacaacacccaacaccacctaactatggccctcgatacagtcatttaacttaataaccttccgtgagagtaaggtcattatgaaatatgctcggttttacacaaagctttaaaaaaagccacataaaatagtatatgaggtcacctctgattcctatgtaaagaagattcctcctcccttccctcattcattgttctccacactctactccacacctcccctcaccctgcaatccaacttatcaaaagtttaattttccctttccaaaagcaatgtacttgaaattcctattcttagttatgtgcattttggtttcctctttgattttcctttttttccaggtttcctgttgataccaacatgaatctcaagggcttccctttgcttcttttggaaaaaaataaagaaaagagactgatttagagcctatagggtggaaaatcacagccaggaaaaggcaggcatagcatgcagcagttcagagacagggctcacccgcccatctcttccatcagccacctccctggtagggcatcccttggaacagaagccagcaatggtcctgcagggattggagaattgtgagctctaaatgataaaacgttgagtcataggttatcactgtacagagtgatcctttggcctctgccttgagggcacgtaagccattttttccttacttgttggaatttgattcatttcctctttttctcctttagctctctaatctagaattctcagtttatctataaaaggattcaatatctgggttgatcctgaggagtcaaagggttggttttgtgagcagatgggtggcagacaatagcttttgtagagatgcctctgaatgagcccacatggtggggctttgagaagcctagtgtggaatcagtaacaaagtccaccttggaataatagtaccatagtttcagtaactgctgattccaaaaatgtttcctatcacacatcttcctcatctgcctctcacaacaatcgtgtcaggagaaagctaatccaactataaagtggctacgtgatcagaaatgacaggatgggttcattgcaatgtcaagcctcagtagtttttcatcaaagccctcaaaaaaaaaaaaattccaccccaaactgattgtgtattattcaaccagacttctggtatcttcaggcacactgtttgcaaaggccaggcatctcttatgtcctgctgtctgtagacctctgtggtttatggatgggaaaactcaaacagtctgctcttagatggtccttattgcagaaagcaggcttatgccctgtaagccgggggtatctccaaatcgtgcaggaggagaggtactgattgctcatttgcttcttctgtgccttaaaatcaccatccttgttaaagaaatgcaagcattgagtagagaagtgtcttgcttgggcttgcttttgagtaccgggaattcagctttcctgctttggaaacctgagttgggatgtaggtgtgtagcaaaaggaatgggtggaggcttctaactaatggggaaggcatctctgaaacaagctgagatgtggatctgggattctgggaatcaaataattcttcccagcaccaaactttgatgagagaatactttaatgtctgtggttgcagaataaatatgattcactctgaggattctgcactgcaattgaatatgtcagaaaaggcaaataaaaaattggaaaatttatctgtaaatagttctcaatagttttagaagagcttccaaggacattaatttcttcctagccattatttattaaaaccttcaggatagcatctcattttttggccacactaatgtagcaactaagtgtgcaggccctggattcagagctaaatctgactctttcaagctgtaagcccttgagaaatctacataaatctctctgtgcctcattaatgtcaactgtaaagtgaggaataatgatattatgtattttgtaaggttgtccgaatgtttaaattagattataatacttaatattaattgaccactttggaagtgagcattgttctaaatgctttaagtatgaattttattgtcatcgccatccatatcaattatccttatttattatgctgttataagaagctttgatttcacaaagaaagaaattcaacacttaaggaggaggcatgagaaaacatcttattgaggtttttaatcatcttctagtgaaccaagcaagactgaacctttattgcaatgttttactaggctttatagcacttttaaagggtcaggtaaataaagtcataattcaaaacagctgttacggggtggggcacaatggcattgatatcaagagactctagtactgaatcagttacttcctatttatataattaaaaaatttttttgttgttgtttgtttgttttgagacagagacagctctgtcccccaggctgaagtgcagtggcacaaacgtggctcactgcagcctcaaactctcaggctcaggcctttcccacctcagccttctgagcagctgggactataggcatgtgctgctatgcctggttaattttttatattttgtagagatagggtttcaccatgttgaccaggctggtctgaaactcctgggcataagtgattctcctgcctcggcttcccaaagtgctgggaatataggcatgtgcccacacctggcctatttgtataattttgaataaatcatttaatcttgctgagcctcaaaaagcaagctttaaataaagaataaattaaaaattaaaaggttgaattaggtgatatcaaaggttcctttcacatctatgattctaaatattactcagtatttactctgtgcagaatgtctatttccacaggctattgcttacagcacaacacagtgatcatattcctctttcgtaactagggagctgagcaccacgatgctggctactggcagagtttatccctcagcccatattaagtctagaaatgattttgtccaactgatgttttctcttcacatcagatgtcacttttttttttttttttgatatggagtctctgtctgtcacctaggctgggtgcaatggcgtgatctaggctcactgcaacctccacctcctgggttcaagcgattctcctgcctcagcctcctgagtagctgcgattacaggcgcacgccaccatgcccagctaatttttgtatttttagtagagacagggtttcaccatgttggtcaggctggtcttgaactcctggccttgtgatctgccgaccttggtctcccaaagtgctgagattacaggtgtgagccactgtgcccaggcttttttttttttttttttttttgagacaaggtctcactctgtcacccaggctggagtgtagtggtgcaatcaaagctcactgcatcttcaacttcctgggctcaagccattctcccatctcagtctcccaagtatctgggactatatccagttatttaattttaaattcaccacactcagctaatttttgtattttttgtagagacatggtctcactatgttgcccaggctggtcttgaacttctagcctcaagcaatcaatctatctgccttggcctcccaaagttctgggactacaggcatgagccaccacgcgcagccagccatcacatttttagataaaacatcgaggaagtacttatactgatatatacattttactatagcaactatagtaaagagaaaccagtgagtcctaaaactgaatttttaaaaaaattagaaacatagagttaaaattaagattatactcaaagttcttcagagataagtattaaagtcatatttccaaacctttaggcactataaagaattccataaataagaggttatttaaaattaaaaaaacctatgctcaagcaatatctttgatcataagacaattctggcaatgagacaaattcttgaaatctcaacaacactaacatgggctcagatttttgctttcaataaatagaacctcatcaaagaggtcttggaaattctgctagtcaatggaataaaataatgaatcggatagaagtcctccagccctgtgctggaccgaaatgtctctgactgcctgtcatatttcagaggatcgtgctcctcagagcagtgtggggctggcacagagatgaaagaaagaagaggttcctccctggtttctgtttatttgaacctgaatcagaatagagaggaagcaaaggagaatgaatggtgtgatccaacttttcttccatatgtgaacaatattgacttatatggcataattatgcccagatgctgtcgtgacagggtgtagagatttctgacttgcataactgaatatattttttaaagacaacaaagaaaaagaaatcagtcacaacattgctttagcatcttgagtcttggagtgcttctgccatggaaagttatagtctctgctcttttctgcttagactgtatcttaaaactagcttcaatattggatggcctattttaagggagatcctgacacttagtatccaaattacaaaagatgactaggttactgaggatctgaagattgtcccatataagttatagttgaatcttctgtggaagtttaacttggataaaataagcagagaaatgacaaatgtgttcacatatgtgaagatcatccttgtttttcttgttttgttttgttgttttatattctaggaagcacagtggaatttgaaagacagactttagatcaccatattggagacctttataacaattaaaacataggaatggggcaggaagccttattaggtggtgagattgtgagattcctctgctgttgatggagactagacagaggccagatgaatgtgtcaataatgttgcaagcactgcttccatattggctagaaatttggaaggttagaaaaagtcaccaactctatcatcataagaaaactgagttgagggcagaaagtaatatgatatctgggttttggggaaaccagttacctctcttcaaatctttaatgtggaaagaatgaaaccatcttagacctttttgagtacagaatgacttgaagtcagaggaaggagcatggcagacacagaatgtcccaaattgagacagcatcttttaagcaaattgttgtccctttgggtagagtgggaataataatatcgcactcacatttatctcacagatgctgtgagggtgtgtgactcagtgtttttaaagagctttggatacctgctgtggttaatgtgtcactcactgcgaagctttccaaggcaattattttgatcagaatgtcactcagagttagtaggctggcttcatgaatcatttggggagggtagtataattcaaatttgttatgtattgtcaaacatttaaaaagaataatagtataaaacaaaatacttgcttttacactaaaatttaacatcttttttttttttttctgggaaaatagaatgttgcctaaactgaagtccaaacaactttactttttaccttttcaaatatccatgtggcatcaagccaggccatttaaaatgacatccagttatttaattttaaattcattttgtagaaatcccacctctctggggagtatgtacagcaaaagtaaggccatcacaaaagctgaatgtcccaaagtggtgctttttagcagaaaatgtaatttttttaagatgaaacttgccttcagtgttcttagagagtgggttccatattggtttctgaaggagagtcaagcctggtctccacagtgcactaaatgcagtagggggtcaagcaaatgatgggaaaagcataaatcatcttggaattatagattcctctttgctgtttgactttaaattcaccatctgctggctgaatcttgatgggagttgaacataaacataaggccagtgcatgactgtgacgtggaaggtggaagaaagttccttctgacttgttaaaacccttaaaatctacacattattattattataatttagacaatgtctcactctgtcacccagactggagtgcaggggcacgacctcagatcactgcagcctcaacctctccagctcaagcgatcctcccacctcagtttcaagtagctggcactatgggcatgcatcaccatgcctggctaattgtttctatttttttgtagaggtgggttttccctatgttgcccaggctggtcttgacttcgtgggctcaagagatcctcccacttcagcctcccaaagtgctgggattacaggtgtgagccactgcgcccagctgacatctacagattatcatctattattcttgtatttgttaaccatgatctcaaaatgatttaattataaaactcaaaccttaaaggacaattggattccaaaatgtagattatatgtagataatatttctgttcacaagtctaggtgtacattagtatccattcagaaaagtgaaaaaaagtttaaaagcatttttaaaaacatgatgaaactataacactcaaaataatgtgatgggggataaaaggcagttgattgataaatgagtcattgacaggtcaatgctgtaaaaggccgagtctaagttgatggctctcagtcctggttcgtcactgctgttgtggaacttggcaacgagtccctcttgggaattataggcttagcatcatgctcttgctcgtattagctgcttcttctatcactctttcaacagtaacatattaaaaacaaaaacaggaaaaaaaaccctcaaaacttctcaggtaagtagtattaaggacacaaaaatatttcaggcttgatttagaactacatttatgaaagtaaactacgtgatatagagcaaaaccacaacctttaggttttggggggttttggtcttatttctctttttaaaaataagagatagggggtctcattctgtcatccaggttggaatgcaatagcttgatcacagctcattgcagcctggaacccctgaccacaaagggatcctcccacctcagtctcctgaagctagaactacaggcatgtgcctccacacctagctaattaaaaaaaaaaaaaaaaaaaaaaaaaaaaaaaaaaaaaaaagtgtgtagggaaggggtcttgctgtgttgctaatgttgaactcctggccctaagtgatcctcctgccttacctgggattacaggcatgcaccttgtgtctcactaatagatttgctttctaggtctttcctgtcaggtccaccaatattttagatggatggagcacttgattagatcaggagtcaaaattctattcctgaatctattacttaccagttgtactactttgaatgaatggcttaattttttagtgactttgaattgttccagatataaaatgacaggataggtctagagagttgccttagatgaattaggaaacagtttctgagatagagatgttagtgcagtaggtttattggggagtgttctcaggaatgcctgtggggaagtgaaggatgtggaggaggaagatggactggaattcatttgccagagtcctcagcagatcctaccagctctagagctgggatggcccttcagagttatcctgatccacaaggggtcagcccctaggcattcataagtcactttgtccagtcattggggttgaccccaggaaaaggtatggtttggggtaagaggactcttcagttgagggtagttcctaggaagctagtgagctatgagttggcatcaggcaacatttccagcaatttggtcaatgagttccccttaaggctggatctgggccacggaccatggcactcactgccatattcacagcgtcgttttcagtgtgaaattctactgtgttaaagtattgtacagtcactgaaatgagagtatttttatatttggctacccatgacatttattctcttctgattatattgtttctctcctgatctagagttttagattgttttgtttgttttgttttgttttcctgtacttttctgtctgttgaggaaaaagagttttattcttctagtatgagagtttctattagtcctcctttttagacagatgaacaccctgtgacaattccttttgcctttttgtggcgtgtaaaaaaaaagaaatccataaatagagtcgttacgcaagtcttcatgagttaatttctctctccagttttcttactactttttccagttttcattttcttcaacagaaagcttcttcttctggctggacacagcggctcacgcctgtaatcccagcactttggaaggctgagggggatgtaatcccagcactttggaaggctgaactcctgagttcaggagttccagaccagcctgggcaacatggcgaaactcccaactctacaaaaaatacaaaaaaaaaaaaaaaaatagctgggtgtggtgatatgcccctgttgtcctagctaaaggggaggctaagctgggaggattgctagaggctgggatgttgaggctgcagtgagttgtgatcataccactgcactccagcctgggtgacagagggagatcttgtctcttaaaaaaacaaaagtttcttcaaattgcccctttacaatttaatatgcatgaacacatttctttacaaagagaaggttatcttttatctatattcaaaatcatatgccctggggatctttacatcacaatgcaaataaatgttgagttaaccaaaggaagtgtgagtaacaagttagtgactgggttagggggtggttaggacagtggcgtgtgattaagagatgaacatctcagaccgatgcttagtaaaacctacagggggaagcatgatgacctagccttgaatatctcatttaggaagttacacacgtgtctgggcttttcaaaatgtttgcatgccattaatcagcatcttacatcagcttgctcaatgaatgatgactatgtcaaatggaagtaaaacatataaggccagagaaggatgaagggaagttttttttaatgcagtaaaggataaagaaggatggaagtggccaggagtggtggctcatacatgtaaccccaacactttgggaggctgaagtgggaagatcacttgaacccaggagtttgagaccagcctgggcagcatagcaagaccccatctctgttttttaaaaataaaaaaatataaaaaaaagaaggttgtaagttattcaaacccataaggagttcagccaatgtattgaggtttcacactttagatatgatcaatttgctgtctttggccttaaaggaaaaacacaaacacagcagcctcgtgttcttctcagacattggtttctcctcctttcttcctaagacagctcttttcccactttctctctggccaagtccatgctcagcattgcgtgacttcactgttagtctaggtttattctgctctgggaagtttccctgacccccttcttgacagctgcagatcctgtcagtcacttctctgtgtgcttcccttgccttccttgtagatttttattacatcaattaggatacaccattacaatgcattattttgtataataaacacctgtatagtttctaccatatgccgggcactaatctaagtgatttacaaatgattattcttctgaccctcatcacaattctatgagagcagtctattattttcaccaatttatagaaaaggaaactgaagcatagagaattgaatacattttctttgatgtcatagcaagtaagaaaaaaggctaggattctaatccagggagtctggctccacaacaggtgcaattaaccaccagaccgtgaggcctctctgtcatatgcaagctcgtctgttttgctcagaagactgtgttttactcactcactcccaacttcttatggtaaaaattgctttttaatgatttaaataatacatgcccatgtaaaagttaaatcaatgactaaagcattctgaagaaaggaaaggttacctggaatcccatgaccctgaaataaccatcattaaaattttgttctttatccttccatgcattgtttaatgtaccacctacccacacccatacacagtaattaaatgggacaatataaccatttttttaaagaaggatggacatcatctgctctcatcctaccagagttgtctatcccaaaaagacaggttaaaaatctatgtgttttttctataccttttattctctcataggcttgtatctctcatttacgttaatggaactcattggtgtttcaaaaacatgatcatcttaaatgtactcttttagatgttgctttgctcactcagcagtcaccccatgtcacctggcaaagccctaatttatttttttcactggccacgtgacattcattccacagtgtagatgtatcacaatgcattcaggtattctcctatggtattaacttggcttctagaatgcaggggctgtctttaaccctggtgtttgtgacattgtgatgggcataatgggatcccttgaataaatatttgtaaaacatggatggaagtcagattttagaaagaataaattagttttttcttaattatgcatggatatggtcttgaatcggttctcaataaatcaaatttcagtaagggactcacttaaatgtatgagaagagacccctgtaatcaatgtttttaaagttaaatgattgtcttttacattttaactggtgtaaaataactaattattgttccaaatagaatttttgcttaaagatacgtacaatggaacgttataaaaccacctatatttacagataccttgtgctttgtgatctggcttgtatttttcctgttcctttcctgttaccctgtgtacgaaatgtatgttcttcccataaaaaaactaaactacttccagttgtgtaaacacaacagattctttcagaccactatgccttggtgtatgtcaaccctcagctaggaataacatttccatctctgtgattccattggcaatttctgctcaccttttcctaggttgaagtgccacttcttctgcaaaacttttcttgaatctcctttcctgttaccctcctgcacaattaaaaacttgcatccatttgatcccatagaatttatgctgtacttacatgacaggtacttacatcttttattttaactcatttatatcacttacaagactgtttttttctttaggacttggaatatgaccttttcatctttttcactgcagtctttttagtgtccagcatggagaaagtgctcaaaaatatttgttgagtgaatgacagtagagaaaataaaaatgtcctggattggaatcatgaaaactgtctacttatctctaatattaaaaagctcagtgtaatcttagaaaaaataatctgagagctctgacactttccagaggccacttccacgggaaaggaggagcaaagtctctgatcagaagttgagtaaatatcctctgaggtccctgattatccagacattgacaaaagaaaggctctccaaggtttgccattattactataaggaagtcccagctcagatgattcatagttaaatatttgcatctcctctggctaagaaaaataaaagccacgacattccagagcctttaggcatgtaagatcttggtactttcccagttattgctccttagaaaccggtaactgaaaaggccctgtttcagaaaagcaagatatgtcaaatgggaaggaagtagaatagctatctggttggaattcagaaagtatatcaaggccaacaatataattgttgaaattggttattaatgttttgatactgtgacatatctgttttctgttctctaccacaaacaagaaagatgttgaaatatggcaaatgttatgaataacaaagaggaaaatacaaataagttcttttggcaaatctccgtagcaggttgaactcagactcctttaatgtcaataaacaaggctcagagtcaatgccactttctttggtggtcactttaagtgtatttctcttacaacagccctgcacgtccagtgttattattactgcttcacagataagaaagtggaggctcagaaaaataatgatccataattgatatagtggtatatatataatttatatattataccataggatttaaactgaagtggtaaagcaggtggtaatttgcagagaatgattttggaaatgctccgtagatacctctggctctaggcatataaaactattttcttattaactgaaaatttacaattacaacttgattcttgtggtttaagacaatggaggctttctacatggtgcatgcgaattttcccaaaatctttcccaaattcatttataattcagtgtgggtgagcttaccagttcctttccagaaaacaattgtgattaaggagttcacacagacaattattctgttattctcctctgtcctcaggtaggcagtgctcctcgagctttgggtggcaatccttcaccaatccattgtcagtgtgggtccagcttttcctccttaggccacaaagatagagttgctcatattttatttccaaaatatagtgttaggggcctgaaggccacaaagaagactattctgaaagctcccacactgacatcctccccagtactggaaaacaagtaataaaagagtaggaaaaaagacctcagggccttgcacataataggccttccataagtttatttcataaatgagattctgcttgacggactggcagatggagcctgagtttatagtcctgtctgttattaccttgctttgggccctgtcataacacttcctctcaaacacgtttgaaagaaatgcagcccaacataggccgtctcctcgctgtgctgagagggtcttgggtctcacaaagcaacacacacagccaggtcatgtctctgagcatcggatctagaaaactacaaagccaggaagacatggacaatgctaacatcctccctttgtccaccacatacatgcatgaaaacacacctaccctcactctccacccacccacacacacacacactggaaattgtatcatacacacaccggaaattgtacccaaaggacgctattactaactatgaagcaagtggcacccatggcttgtccagagaagacacccacagggtcagacttcacacaacaagcctatgaatgggatagcccacatttaggagtggtcttctaatccagaatcttctctttatttagttcaagataacataaacttcctttttgtaaatttgtccatcatccactcccttgctcttatactctagtgagggggaggtcagatgataaatgacaaggaagatcatttccagccgtgatgagtgagatgcggaaaacagggcagccatggagcagcgagagaacaaccaggtgtggtcaggggattccctagtgaggtcgtttccaaaaccctcatgggtagacctgaggctgtgaggaaaagaggaatccaggcagagagaatcaaaaatgaaaagtcctcatggcaggaatgagcctatttcaaaaaaaattaaaaaacaaaaaaatctgggtggcttaatgaaaaagaacaaagagacccaagaggctagtcagtttcgactggtgcttagaggccatggtagagtggacatttttttgtttgtttgtttttgagacaaagtcttgctctgtcacccaggctgaagtgcagtggcacaatctgggctcactgcaacctccgcctcccaggttccagcgattctcctgctgcagcctcctgagtagttgcaattacaagtgcccgcagctaaacccagctagtttttgtattttcagtagagatggggtttcaccatgttggccaggctggtctcaaactcctgtgctcaggtgatccacccgcctcagcctcccaaagtgctgggattacaggcatgagccactgtgcccggcctagagtggacattttattctacatacaatgggaagccatttgagggatttcagcaaggagattacatgatctcaatggacttcttatttttctttaattttatactttaaaaatttttgaaacaggggctcaccctgtctcccaggttggagtacagtggtataatcatagcccactataatctcaaactcctgtgctcaaagctatcctcctgtctcagcctcccaagtagctgtgactacaggagtacacaccatgcccagctaatgttttaatttttttgtagagatggggtcttgctatgttgcccaagctggtcttgaactcctgagctcaaacagtcctcctgcctcagcttctcaaagtgctgggattacatacatgaatgcacctggcctgaatgtactttttaaagaatactaaggctattgaatgaccaggtggggtagcagagaggaacactgtgagtctgtggcagtgtctggataagggattatgtaagtaccactaagatggctatgttgaagagtgagggagcatttagtttgtctgttttataagtagaggccatcagacttcagaggaattcagacttaaaattcatgtgcctttgaatggggaccacatacatgtcacatcacactaacactaatgtttcattgattcattctatcccttcccaggaatcaaattttgattaagagaaagaccctaagtggctgaaggaacaaaaagagttattgcaaaaaaaaaaaaaaaaaaaaaaaaaaaaagctgatgcagttaggaaagggaagcctgagctattaagaaaaacacattgcttcttacatggtagtgctaaaggccaagcctgcatatccctgcaatctataaagtctgttttctctgacagtgtcagagttggaaagatcaataggtgtcactcacaccattcatcatctcagaaatgagaagatttaggaaaggagattgaaatgacttatgtggggtcacagaactagttattgttgagaccaaatttagagtcttgtctcctggatctcagtattatactttaattatttcttttttaacatgtaacccaatttgctcctaatagacttggaatacacagtgcctgaaatgtaaagatgacttactcttggccttaaggcatcaaatctgccacacgaaattttaagataagcataatacatcattggaattactcctgcttcttgtacctctttcacatgagttaccatgaagtgaactctatcttttatggaggagaggatatggaggagcataggagaaaggtaccatgtgaaagaataaataacgtctttgccttggactaagttgcattgcagttatcaccggaagttgacagctttggataataagcatggatcttttttgtctttgttggagcctgttgcccttcacctttatgtaacatctaaattctttattctggttgacatgggttgctttacaattttaacttggcatgtgtcatacgatcataggtataatattctacagttacaaaatatgtttgataagtatgaggcattcatgctcattgtgaaagccttcaaaatgtctgtacgctaggagaatggtgaaaaacaagcagtcaagtgagtctcagtgggttgttttctcagaccacgtggactctcttctcaaatctggtactggttttacgtgactttggagaatcttcattctcaatgagccccaaacttttcagtaaaataaaaaaaggattgatattttatgaaacatttttataccctaaaatgcagaagcatgttagaaatatatagttgctatcagtcttcaattaaatgtttaccacttggcaaaaatgatactttggtaaatccaaacatgcctaggtatccactctgtatactccggagaatgttcctatttaagcttattattgtcttgagcattaagcatctcacatcagttgttacatctggctttaagtctccaatgagccctggggaactcaatcccatcaaaggaatttcgagaggagttcacagctcctatctaccatagaagggagaaacaggataaggaatagatccctgataaagcacatgaacaaattaaatccattgttaatttgagtgactggcatagagaggtggcccctacaaaattgtcactttttagagtcacggtggttcacagaagaatagaaatcatcttttcctcttaacattatttccatgtactacagttccctctccctaaagtggtctacttgcatttgtcaacactgaaagcaaaaacaaagttgaatatacacccatggtgcatattgttaataaagaagatggaggcaattcagtggtattctaattgtaatgataaaaacttacctatttcatcagttcctctcctttgcccctaaaccccaaatactcactttgtctcttagatatcttgaagtagagttaataactaacgagaataagcatctccatccatgaaatattttaaatatagtagtgtggacctaaaaagatagtgaaattggataggccatgaatagaacaagtcctcatgtcataggcaaacatccagaaagttgtgtgttttgcatttgtgttttgttgtttacatctgttgcataggaatgatcatagttacaacagctgacatttaatgaggacttttcatatgttagacactgtgctaagagctttatttacatgctttatctaatttaatctgtacaaccaatttatgaaatgggcattttccagacaaataaaatgacgtttagtaatttcattttgattgcctgtagtcaccgccaataagtattagagggaatattgcaacccagtcaactttctccagagtttatctttctgtattcctcagctggttgttggaggttgattgaaaaaccctttgtaagccttgaaatgctaaatagtctacataggaaaggcttctactattgtttctacttttttttaatggtttgtaatctcagcagggattgtgttatctaaaaatctgcttgatgaggtctgagatactggcttttagaggtcagacaggaatgactgcaagataacttgactttctccttcccctctgctgctaaggggtaaggtgggagtggttctaggacttctgccatagaactagatatgtgatggataggaaatgaaaaaatgtgccactactgcacaatgtcaagagattaattggcatttaatgaaatatctgtgccatattattttatagtgtgcaacatttaaaacaatacacatgtaaaaaataaaaaataaaacaatatgcatgtatgcatacatacacacacacacttttagctctgtcttgagctgtcatctcctggggcaggcttaatgacaggtgcaattctggcctaattcaacctcttgaaattgaaaagggttagcaccactcagtggctgctaaatcctagagggcaaaacagcctcctgtgtctcatcccttcatgactgtctcatgggagctcgatttctgtctctttccacctgctaaccagattcgattttgatgctgtaccattggtagtaaaatatacttctttctggtaaaaggagacctgagaaagtagaaatggcattatttaaaggaatttatacataccatataagttggctggatggaccagccaacaagctcaacactttgtattcattgtttcttttaatactcatttcaagctcctggattcagtatcattatctccatatcacaaagaatgagggactctgaaaaactcaagaactttcaaggtcactcacagaatacatgcctgagctgggattctaactcaaccccttaagcccgatatcctgtactttttctgctatatcaggggtcagcaaatgatagccaatgggccaaatcttacatgctgcctggttttgtgaatgtttcatggaacacagccatgcccatttttttatgcactgcctgttgctgcttttgctttacaacagtcaagatgagtgcttgaaacagaggccacatggcctgcaaagctacaacattgagtggccctgtatgagaaacacttgctgaacccaataacaatacgtgagagatgtattgttattgacaataacgaaacatgagagatgtagctcaaatcatttaactcagtgtgtctacatctttttcctgtatcttcaaaatccaacaggataggtctatagatatactgtcttaagcccagcttcttgtatacatttattttgttccaagataacgtgcagaaacccgaattccagataggtctcttataatgagtcatgtttaagagggttctattattccactttgcatttctagaacatacttctttcagaataattactttctaaacctgttcacttagcaggcagatggaaatccaacatcctttggcagagaagagagaggaattttccactcgggcaaagtgaagcactggtcagctcgtggctgaaattttttatgtcatcccctggttctacagaagactgtaaggacagaggaatgaggcatttcgccttgggatcttcagactcagatttctgagtcaggtttgaggttcctgctgtcctgtgggcagtgaggcccagggattacaccaaaggagcaggaacccaatgtcacaggtcccctaactcctgcctagttgcccaggccacataggcacaggcaggggagctggctgatctcatttgtttgttttccgtgtccgttctcaggcagtgataggcatgctatcatctcaattcttaaataaaaccaagttgtatcgttgaagagcagataaagcaaagacagaagcattttaaaaggaattttgtggcttccaaagtacaagtatagagtatttctgagttaatgaagaaataattacaaaatatttttgaaaaagtgacattttattcatagtaattcatgtaattccaactgaagtaattgatactttgtaatagtaaggacctattcgagtgaatgtttaagatactaattatatatcaattttaaattatttaatatcaaaaaggcttgaaagcagcatattttgtgtcattatgtgaattcttgctttgccatttttaaaactatttgttttctcataccccctcctctttattttttatgatgtcaaagactgtgtcagtcaagtctgtctctatgtcatttgagtttatgtttatgtgttagtgcatttttacaagttaactatccagaaacatgcacactctgggcagaataaaaaatgtctaagttaagtgaaaaccactttaaagcatggcagccaaaatagctgtagaaaagtttatgctctattatgtacaattttaatagacatgatatcttgtttcccagaatacaacagattgactatcagtcattttgtaaaaaatgaaagcaaaactaacaatcacaagagctaagatttgctggccctttgcactgtcccaggcactagtctaagtcttttgcaagtgtttcatttttacagcaacacaatacatttcctactgttgttatccatcttaaggaggaaactttgtacagaaggtttaagtagctaatcaagttttcacagctgataagggatagagccagagtccacaagcagtctagattcttaatgccaatgctgtattgtctctccagaaaagaccactctcacctttccccttgttcttgataatacagttaaattattcatattcatagcataaattttctgtatcatatttaagaatacagttaaatattggtgcatattagaaagatttcacttaaatatgactacatgaaagtagatttgtcttttctaaaaaataaacaagcatttgttttctaaaaaatttactggcgtgcaccatttcatttcctaataattcagaataaatgaggtgtcaccgtggtccacttcaacagtagatgggcttatattcaggcaggaagcatgtcacctatacaacacagatgtgggtgattaatgaaaactaaatcatggggatgagatctttaagaagaagaaaaccaagttgtcttccagaagtgttttcagaaccccctgttttgaggttgtggatagacatgacggttttacaatgccaaaacagtctgttctaaagagaaaaagttcaatcaaccatttcacctgcattatgccgaagagctagtctttacagtcatggggctttaaaactattttgatagcctgtttgggctgcctctaaatatatcctccaaataaaaacctcagaaaatgtatcagagaaatgtacataattaatatttggcttaatatattgtcaactttgattttacatgtcccatccaacttgttaagccttctttgtggccattagtgtttactagagaataatatcatatttaattttctaattatgtgcgaaccttggagtcaggattagttgatatttttacaccttcaaatttataaacctagtatgaagtcccatctagactaacaaatgttttataatagaaatttaaatagtactccagttttgtttatgcatttgctgatggtctttcttgctatgaactttagaaactttaaatgtccatttactcacaatacacacacagcctcaatgacctaataagcagatttgcagagccataaccttgctggcttatgtcagctcgaagtaaaaggggaggtggtagtggtgaatctgtttttattactcagtgtttaatcataatgaatcagaggcttttatgagaaaccttctacatcccatgaaagatttgctgatcaaagatgtagagatttctgttttattagaaaaaattgtttagcacctcattgtggatacagaagacattgtttgttgaaaagtttaagtctttttacgctacattggatgtcacactgttctgagtttagtggtatcaggtcatcagattctgtaagatgtgattctaaaaattcagtcctagtcctaccgagtccattagagaaggtctgcagtatataaaactgtgacttaaaaaatgctcaatcttccatgcacataactgcctgatgactctcaagctcaggtgtgaccttcatagacaggctgttgtaaagtctagtaattccttcaacacaaggtaacttagtatttaaaccttgaccacacatcacttcagaattactaaaggaacttaaatatatgtcagagctcctcttcggaatataggacaatggagcttatgcagatagcattactttaattttaattgtacccatctgggttcttcgaaatggcaagtatttcgtttatgtgcctttctcatcttgggtcaactcagttccatgcactttaaaattattttaggaaagagccacatcttttttttttccttctttctctttctttctttctttctttctttctttctttctttctttctttctttctttctttctctttctttcttttttgtgcatgcatgcgtgcatgcatgtgtgtgtgtgtgtgtgtgtgtgtgtgtgtgtgtgtgtctcactctgctcgcccaggctggagtgcactggtacaatcttggctcactgcagccccgacttcacaagctcaggtgatcttcccacctcaccttagcctcccaagtagctggaattacaggcacatgtcactacactcagctattttttttttttttttttttttttgtatttttagtagagatgggattttgccacattgcccaggctggtcttgaactcctgggctgaagtgatcctcctgcttcaaaagtgctaggattacaggtgtgagccaccatatttggccaagaaccacatcccagtgctgtagaaaactccaaaaatttattttgcaattcaaaatataaaagtttgttagtagacatttagtttgttagatatttaaatctactagacaatctattatgtattctgctcagaaatggttaagacctactgatctagaagacggatctctctgagccataatttctgctcaaggcttgctaggggagatccttctaacttggctttatacacaagaagctagctcacaaaaatgtcggtattctagtagctatgcgtttcattgaccagacctgagatttggcctctccatcacttcctctgcaggtgatgtagacatcatttctgctgacatctatgttgatgcagttctagagtcatctgtgtccctattatcctgaaaatgaaaattgatagcaaaggcagataatgtccatttagttctgggtgtaaatgtcttccttgctcttccattgtgcaagcactttatgatttgagggagtaatcaggttatattccttctgttggccagaagtgcctgttgaagaaagacttggctctgttgtctggaagctaactatgtagactgatccacagaggactccatattcatcttcttgatactgagggcttcatctgtgagttgtaagcctgtaaatcctctgtttcagtggtttcaaagttccaagagcaggaggaaaatccagactgcctctgctgctgtgcagagcaattagacagtttgagtgcctcaactgttcctatacaggccagtggagtcagagccttaaaaagaccctcttctcccagtgctttctcaagtaagtacagcaacctcaatgtcttatagtatcactacagcacaatacatgagtagttttacatttgaagtaggattaaattaaaagtaatacattcacatggtaaactcaaaagtatatggccaggtgcagtggctcatacctgtaatcccagcacttagcgagactgaggcgggtggatcatttgaggtcaggagttcgagaccagcctgactaacatagtgacaaaccctgtctctactaaaaaccctgcagagacggccaaccccatctctactaaaactacaaaaattagctgggcatggtggcacgtgcctgtaatcccaggtagttgagaggctgaggcaggagaatcacttcagcctgggaggcagaagttgcagtgagccaagatggcaccactgtactccagtctgggtgacagagtgaaatcctgtctcaaaaataataacaataaatgtatatatagatataaattatatattaattctatattttatatataatatatactataatttatatacttataaattatataatatacaaatatatatttatataaattatatacctataaattatatatataattatatataggtgaatatatacagatgaatagttatatatgtagatgaatagatatatagatggataattatatatagatgaaaatatattcacatgttatatgaatatataagtatatatttatatataaattgtagatacataaattatgtgtaaaattcacatgaaaaactctctccacctcattttaccctttattccttctctttaaatctgttgaccaaaacaaatcactgttaacatttgttatttaggggtccagaaatgttttgtgtataaccataagcatgcatatatatacatatcaacagctacatttagatggtccacttactacagccccagaatggaaatttcttcctcaaagcaaacattagaggcatcttttgggaaaaaaaaaaaaatctatatttatctcattctgttcttcatttaattagcataatccctgttggatattttcctcaccaaataaggaacctgtaattaagtgttatattacatgtgcttatttctcttcctggaagtccattttttaaaaatatttttaattgatatagcatagttggtacatatctttggggtacatgtgatattttgatacatgtatacaacatgtaatggtcaaatcaaggtgactgggatatgcatcacctcaagcatttatcttatctttttttttttttgagatggagtcttgctctgttgcccaggctggagtgcagtggcgtgatctcagctcactgcaagctccaccttccaggttcatgccattctcctgcctcagcctcccaagcagctgggactacaggctcctgccaccacgcctggctacttttttatatttttagtagagatggggtttcaccatgttagcccagatggtctcgatctcctgacctcgtgatccgcccgcctcagccttctaaagtgctgggattacgggcatgagccaccgtgcccggccaagcatttatcttttctttgtgtcagcaacattataattcttttcttctagctaattagaaatatgtaataagttattgttaactataatttccccactataatatcaaatactgtaagttattccttatatctaactctatttttgtacccattaaccaactgttatttacccctgctcttctccttcccagcatctgataaccatgatttcacgctctatggagatccttgctttgatgataaattcattaaggacaagaaccctgcagggtgttcaatatgcttcccaggtgccaaatagtctcaatacatattaacagaaagtcagtgtcaactcacctgcacctcacacagtaaattgatttaggcatctcagattcctaaactctctaggttaacacctcatatagtaatgaaagtataatcagttcacatgattgaaatcctctctagtttaatgtacttgttgcttttccatggactttgaaaacatgaaggtctgtagccgtgttgttgcttttccatggacttggaaaacatgaagttgtgtagccgtgtgtctccagacttttaacagcccagaaatggtttcaatgttctgcattaaataaatcgagaagggttagacaaaacagtgtctgaaagatttcatgctgtgagggtgatgagggtgatgggtgacattaatgaatctgaaatggtcgtgactacaaacttgtttttaaaatgtcactttctctaagagaacaaaaacttgaaactcaatgttcatgaatacaagaaggccttttcaaagaaaggccacgggcactctcactaatacacacttggcatttgggtatatccctaagctgtggactgtgtttacatatattactctttcttctcatcactctttaaccaaattgttgagtgtccaagatgccacatggtcaatggattattaccctgtggattcaaatctgttaccaattactctaggggtttattgagtggtcctgcacacccactttcctttgtttttctaattatcgctgcacagctaatcctagctcaaaaaatcaattcctctctcatatctacttacatatcctctttaagccccttctgtgtttttttgttttgttttgttttgtttttgttttatctcacttccatctatttcctggttatttcaggaaaagttcttttcacaccactttttagtggattccatcctgtctctcttcttgtgaccataaaataaaatttgtcataaacaaatgtaagagtctggatgtttctacaaacatttaagtggcaggaagaagctaaagccatatttttcagtcaaaatgttagcagagattttcctgcactgtgcatgatttattttctttctttatatttttagataccttataaattgtctaaaatctcaatgaacaacatttatggtcaaataacataaagaaaaatcctttatagccacttacttactcaattgtatagtgttttgacattctaactacactatcagtatggttttctgttataacgtagtataggtatagattttagccacatagtaggtgaaataggctatgtgttaatctagactaagacacagccattatctataacatatattttatgagaatttgcattccaaggtaaaaacaactgtttgaaaagttaccttttaaacaaatccagttcatatggtgcattactttcattttctgaaggtgattcatatggaagtattgagaagagaaacatcatagtttaaaaaaggccaatcagactttgaggacaagatccaaacattatgcaactttatatcttagcagagtgcacttagtaggtgttcaataactctttgttggataaatgactttatgagtaaatgaagaaaacctcagagctattggcttcctgtgccttgaattacacttttgagtgggactgccttctgcaagccagttgaaaaatagctattggctcacagagttcacctttattttgaggactctgtcaagacaccttagtgcatgttcctagttatgtgaaagatatgctgccaatcagaatcccaatggtctccttgtatgtttcatctttaaatggggctgcgctgttagggacaggatatatcttggcagactacatggatatgaaaatttcaaatcttcccatagtcctctatctttaaggaaaatcatggcacttgtttttgaatttttttaatccatcttccagattccaaaactaggaattccaaatgttgtttggacagactgaaaagagaacaaccaataggagaagtggtacactatgagtagtcaaggtaccatacacatgggaagtgtgaaggagacttacttagtatttacttatgtctctttgccaatatttgggagtttcacagagcatttctagataatgagggatggaagtgaagagtaggacaaggtattcaaagatctaagaagaatgagaaatcctcgatttcccatatgacaggatgacttggttacacgagtaaattgctttttgtatgtgaaacaggcagcaattggaggtagcaaaggaatacacaggtaagccctggagtccaattcccaaaattagtggtgttttctgattccctaactgactctatggtaggctcctggtcaaaagatccatcagggctgctgggcccatgctgacattccatatagccatcttctttctgattctctgtcttccagtgatgatccagctctttgcagcagcaggattgtggctggccagaagcacacttgatttcaaaatggatgtgacgggcaggtcacctccttttctgcagaagtgtacttgcatcaacaaatctttttcctctcaggttttgaggaaatgggatcaaacattccaacacagagaaataggaggcgtgggcagcagctctcctggatctctctctttccttgaggagatcaacttgtaaaagattacaaaatgtaccctaagtggtcctagagcaccctcctatcttctttcccaagcttgtcatgtggttgcagtggacatggaaagtaaacactgctataaacagagaataataaattgtaagaaagcaccagaatatccttcttgcttgaactttgaatcattagatccaaacattccccctctctcttctcaaagttccaaagtgttaaagagttttgttctccggtatcaggagttggccacaaatgctttctctataagttcataattcctgttgggaaacttggaaaagagctctccccttctcatccaaagaagtgatgacttctctttgttagtttacaactaacaaagtcccatttctggtttgaaagtcagatggaccttggcttatatttatttaacaaagacgtggaatttctctaacagactgaaagtttattagaataacatctagcattaggcctggcaaataggaggtcctcgttaagagatctgatcagatttgacttctaatcccagatataaggtgtttattctttttgagccactatttcctcatctataaaataagaaatattcataactattccataatatgtattcttatatcctgtataataaaataactaatataggaatataataaataactaggaattataaataatataagattgtaataaatatccaaaatcaagggcctccttgaatttgttatatattgatttgttgattttttgagggcagtaatcaccacgtctgtccagatcagcgcggtgtccacgccccactcagcactgtgccttgtccatagcagatgctcagtcaatatttatctaatcagtgctgtttgtattcaaagagaatgtttaacttcttactctttccattcccacctcccctttttgatctcatgtccactatcggtgtactgaggtctcctgggctctgtttgcaggaatctaaaagtagtttttttactttggtactgggacatgtaactccactttttagagaaaatatttcatgctaattaaaacatctcagggctggtctccctgcacttctcactttcacacctacatactcataccccttttctctttttccttactttgtaatgctattagagttgacagaatacttgctgcttccccagaaagtcttagccaggagttcatgaaaccctgtcaggccttgtgaaatgtacagatgtgtttcaaatgatccataaaccctgatattgtataaaatgtgtgtgccattttatggaaagaggatgatatgttttcttaaccaaaatctttcggggtacttcggtccataaaaggctaagatccactccactaatgagcaagatctagtcatttagaaaatcctgcactctctcctttgttactgcctcaatttccttaaaaagctcttataagataataaagaagccctctttacttcctacagttccactccacagcaataccagcttaagtgtgtgccttccagcgtccatcccatctctccgtctgaggggtccccactcctagtccacccaggccaggaaacccataactcatatgtaccagaaaacctcctttttaaatttcctcatgcttcctggcaccctgacctgacaatggactagtacctcatatccacttctaccatgacttctgagaaagtggtattttttaccacagtgaacttggtatatgcagtgtgtgtcaggggcactggccttactaaagtagaggcccattctggagaatagtaagaaataaggagcaatacattgatgaaatagaagggacattaagtgatggtcacagaccactcttaggactgccattaacttcagatgttaaagaagtgcttcagctctctgtgctttgtcttcttcttgacaagtgaggatgttaggattatctgccatgtcatccagcttcaatctctataattgtataaatctggttggcagtggactcgttagtgcaaagtcctaaagccttaaagatccgaagttttctcactgggcaagcaatttgcgggattacgacagtgaacttggtgtatgcagtgtgtgtcagggacactggccttactgaagtagaggcccattttggagaatagtaagtagtaaagagaaatacactgatgagacagaagggacattaactgatggtcacagaccactcttaggactgccattaacttcagatgttaaagaagtgcttcagctctttgcactttgtcttcttcttgaccagtgagaatgttagacgggattatctaccatgtcttccagcttcaatctctataattgtataaatctggttggcaatggactctttagtgcaaagtcctaaagccttcaagacccaaacttttctcactgggcaagcaatttgcgggaaattaaacaagtccaaaatattgaacaaatgaagaaaggggccattttaacagacaggaatacttcatactgtaaagatggccaggtgtagtggttcacacctgtactcccagcactttgggaagttgaggcaggaggattgcttgaggctaggagtttgagaccagcctgagcaatacagggagacctcatctttgctagaactttaacaattagctgggcatggtggcatgcacctgtagtcccagctatgccagaagagaagggaggattgcttgagcacaggagtttgcaactgcagtgagctatgatcttgcaactgtgctccatcttgggtgacagaatgggaccttgtctcaattttttaaaatatatatatacatatatatatatatagagagagagagagactatatatatgtgtgtgtgtatatatatatatacagagagagagagacagagagagagtaaagatctcatttcctccacaaatgttaaaaacattattctgattttaaaaaaagaatgaatttttaaaatttacaaatttctgaaatggacaaaaatatcctaggccttcttcctcaaaaaataataaataagaataataagaaattgcactggtatctgaaaaagcaacttaaagctataaaaattaaaatagcatgttatgccatgaaagagacaaatgagatagattcaagtttcaaaataacaattgttattattatgatacaattatattaattttgtacctataatttaaataaaataataataaataagaaaaatcactgaataaaggtaataatttaaataatttaaaatcttaaaataatgattatatgtataataaaactgtaaatttacaattatagagctataaacaattttatagttgtaatattttgtaactaatgaaacattatattttaatgattttattattgttgtaattaatataaagaagataaagaaaaatgggcaaggtttgaataagcacactttgtcgaagatatatggatagccaaaaagcatataaaatatgaccaaaagcctctggtgtttagagaaatgcaaattaaagctaaaatgagattcttctaaatacctatcagaatgtctgagattaaaatgactgactgtagcaactagtggcaggaatgtggaggaactgaagttctcatacactgctggcagaaatgtacgatgacacaacccttttgaaaaacattttggcagcttcttaacaatttaaatgtacatatcccatgtaagccagccagtccactcctgggtatttactcaagagaaatgaaagcctatgtccatacaaagacttgtatgtaaatatttataacagctttatctgtaacagctaaaagttggaaaccacccaaatgtctatcagcaggtgagcggataaacaaattgcggcatatacagtgtagatagtggaatactactcagtaataaaaaggaatgaacaattgacacatgctacaacatggatgatgcaaaataattacactaagtgatagatgctagacgaaaaagagtacatactggctaggtgtagtggctcatgcctgtaatcccagtactttgggaggctgaggtgggcagatcacctgaggtcaggagttcgagaccccccaggcccacatggcaaaaccccgtctctactaaaaatacaaaaattagccaggcgtggtgatgagtgcctgtaatcccagctactagggaggctgaggcaggagaatcgctagaacccgggaggcagaggttgcagtgagccgagatcgtgccactgcactccagtctgggagacagagtgagactccatctcaaaaaacaacaacaacaaaaagtgtacatactgcatgatacaaaattctaagaaaagaaaactaatctatataaaaatttttctctgttattctctactgagaggggatgaggaggattaccaaggggcaaggaggaccttttggaggtgatagatgtgtttattactgggattgtgttgatggcttaccaggtatctatgtaagtcacaactcatcatatggtatactgtaaatatgtgcaggctgggcgtggtggctcatgcctgtaataccagcactctggaaggccgaggtgggagaattaaggccaggagtttgagacatagcaagatcttgtctctagtaaataaataaataaataaataaataaataaataaataaatgcacttttttgtatattgagttatatctcaatgaagctgctttttttaaaaaaaaaaaaaacatataacataaaagagattaacagaagagattcaaaagtctagaacaccaaatattaaaggtagcttttcaaatcagtgagaaaataatgatattacagaaaatggcaaatcatctagaattaaatttctacttcatactatcagcaatataaattgcagactaatctaaattaacaatttaaaagataaaagaaactatagaaaaatacacaattatgtatctgttcttgaatggaaaaagattttccaagcgtaaatacaaagaaaaatttatatagtaaaacaatgattgatttaatttgataatttttttagaaagtttacatcaaaacaaattacaaaattgaaaggcaaatagcagtctggttgtggtggctcacttgtgtaatcctagcactttgggtggccgagatgggcagattgcctgagctcaggagttcaaaaccagcctgggcaacgtgatgaaaccccatctctactaaaatacaaaaaattagccgggcgtggtggtgtgcacctgtagtcccaactactcgggaggctgaggtgggagactcccttgaacctgggaggtggaggttgcaccgatctgagattgcatcagtgcactccagcctgggtgacagagcaagactcccgtctcaaaaaaacaaaatggcaaatagcaaaggggataatatttgccacaaatataaaagaaaaggatatatccttgctatataaaaaggtcctatgaaacagggacttagttggatatttctatttttaaaaaggcaaatcatataaacaagtgttttacccacccatcccccctcaaataaagaaaaaagacagggatggagaaagaagggggaaaaaaaaaactgagtaaaaaaattctttgcaaaagagtaaaaaagagatttgtttcctcaccttgatgttgtctttataagttgttttattttaatcttttgtttttccatattttcagagttcctacaatggacttgtagtacggtacctgggtgatcacaaacataatctagggagtagaaaagaagttcaatgactcagcatagtgttaatggtcttccagatgaaggaggggacatgaacatgtgtctgtcccaataaaggttgagacaaggtttgttgtgcacgtgcgcgtgtgtgtgtgcgtgtgtataacagtgaggagactgtaattagcaggaaaaattggggttttgaaagtagaccacagtcttgtcattgtaccatgactcaccaggaggacagaggacaagtaccctactcctgtgtaaatccagactgccaagtagagcactgagatttgatgagtacttaagaaatgcttgcttgattaattggtaaaagatattaaaggggaagattttatatcacattcaaacatatgaagagaaatgttaaaaatgtttaaagttccatttccagtctcactttccaattcttggttcaaaatacaaggggtaattagacatcgactgtgtagtcaacattatgatcaggctatataaaatcatgaaacatcatcctaaactttaaagaactttgagtttagctgggaaaatatgctcacaggaaataattatgtaggaaaagaaggcatcaaaagggcttaaagcaaccaatcacacagagtttccttgttgggaccccccccccacccgccgggccccaccccgttgatatcctaaatgttctcttgacatcttggatttaccatagagcctagtactgtctgtaaggtcctgggcctgttctaattagtgctgagtatctgttgatctgctacgtgcaaatgggaagataaaactaaatgttagattagggtcaatctttaaaactctttcctagattgtgatggtattcagtggtggttgaccatcatggaattgggagatatttgtgaatgtggctgcaggctgcatgtcctttgtgtctctgactcaagacacacccattgatctcatttgtcttcatttcatcattgggcagaatgcgttctaaaatgaagagactaaaaccttcacagaagcacactctttcaacatctaaggaaaaattgttgatgagaaaactgtgagaacattaggaggtctttaaattgcaaggggaaaggtctgttggtgaaaacagctgaaatcctatggattaaatcaacttgtaaataatgtattcttagagtctgcagtgatctcataggcatgtttaaatgctgtttcttatgactacagtttaaagtcatggtatggactttcagtttcatgaggctggcctgggggaaaagagcatgaggttgaggttgatggtgttaactagagcaactgagcccccatacagaccttctgaacttgctcattaacgaagccacaggatggaaattgtatagtgtccttgaccagagcattagttacaagttgtgagaagagaagaaataagtaagaaagaaaataaatgacttataaaaatcctcagaagatatagtccccaactgttagcacaaagaaaggatgtaaaatcatggaggacagcagtggagaagataacgttagcagacaataaaaggccaaagttttagaacagtagtaagtgtttaagaatatacataatatatcttcctccatttgctttttgtcttcaccataaatagacatgagttaacgtatgtttaaagatttatttcccttttattgagctcacccaacaaaagtttttttcatcatgtcctgcttttacaaaccaagatctaatttgacatgattacgtaattgtgtggccatttgtgcccttccttctcctcctcctttctctaaagtagaaagcctctctttcctagagcctatgtaaaatgtgttaattcgcttaatagcaataataattttcttatgacaatttatctattcactaaagtgttattaaggacctattagttggaagcctctgtgccagctgttgggaatagaaaaatttataagacactgtctttggagctttcaatctagtgggggattcaaacaattaaagagatacttttaaaagacagtgtaataagtactctggaagatgtggcagactgccagttgccttccccagcataacattttcccaatattcattaggaaaagaaccctttaattgtacccaattaaaataccgaatctcccagcctcttctgcagcagatgtggctgtgtgactaagttctgtccaataagatataagtatacatgtttggtgagatttccaggaaggatgctcaagtggagatgactaagtcagaagaaagttccttttagctttcctgcattcctagaattctgatgcaaaagctggagctacagcagcaatcctggactatgaggtaaccttgggagtactagggaattgggatgctagtaactttctagaagcaccaactcagccccagaatgcctcctgctgacttcttttacgtgggagagtaagcatttgtgcatttaagccactatagttggatatttgaccattgcagacaaaaataagatcaaccgatagaatgccatttatgaaaaaaaaaaaaaaaaaaaaaaaccatgggagtggttctcctctctgttatgatagggagaggtcagagatgctgtccctgaagaagtgacattcacactgagacttaagggagaaatgagtgagcaaggtataggaaagtatttaaggaatatcatctgaagctctgaattagaagctatctacaagatactaaaagaagatcagcatgacagaagtacaggaattaagaagaacatagtaggtgacaaggctgaaaaatctcatagattctccattttgcagagacttatagatcatcttcaagatagtaatagctgcagagcagaaggctagagcagagaaagaactttgagagataccaatatagacatggtttctaaagtcttaggagacaataagattacccaggaagagtatttaaagtcaggagagggccaaagacagaaccttgagatccaacacttaaagatcaagaagaagagagtttcctatcttctgtttcttaaaaaataaataaataaataaagcatatcagcataattcagagtcacaaattctaagaaatcatggggcagagggcaggggtgaggtagggtttgttttgttttgttttgttttgtttgtagataaccaaaggaagaaacgattgatgcaagatttcagggagggtgaatagccctccttgtagctttgccctgctagagagatggtgggtggacaattactataatatttacaaacaggataagtctacgtcagcccctaacattctcagtttcgttatttgtaaaatggcgtaatgatacttatcttttagagttgtttgaagagtacataagagacggaaaaggatttttaattagataaggaaagcataatcacctatctttgattcattcacccttttaaactgattaaagcttagaaaataatcacatatgcagattgatcttagtttgtccacctcttgacaatcagttagtagtatatatgtatttttttatttttaagaatttttatatccccatgcattgactaatcttgccccatcatagataagactagaacaaaatattgctttgagaagtccttgagttccaaagatttaccatgaagctaatgaaacctgcattgcagagtccttcactagtatggccttttccaatgtcttgaaaggagtcctagtcacatgttcacatgcttacacatttatgtaaaatatgcaggataagataattaaactacaattatctaagatggcagtctttttttcactctgattttctgtccaaaatattcctcttgtggaagtaggtttggaatggccctgaacattttcggaatctgaactgagagaaagttgagtgaaagatacattgatttaaggcatagtgagatgtctagtaaagttattgtaaggtattccagtgttgaaaaggcttccagaaatatgccaaaaccgactgtgctgactcacatgatgtcatgccagaaagatgaagggccagagattgtatgatgacctgagtttgtccttgtgcaacaagcaccaatggcatatgagtgttgatgggacaagttttgaaatgtatggagccaaaagctagcctgtggaaagttctaccaggcattcgacatgtggtaaggtaaccaggagactaagttccgtggatgtctagtcaaatggaaattttcttctctcaagaataaacatgataatttcgtgtatgcaattctaaattcaccaaattgtgttttctttttcaatggcaatttcaggaaattaaatgatcagaatccccatgtttccaggggccaaacctgtaatagtcccacagacagtgagtgtgtctataacaactaatataggcagaaaaattcaaagacgttttctgaaatttgccaatacctgtaaacatttttaggacattgtcaaaataagctgtgaagctgaaagaagtttatttaagtattaataataaaaatttaataagctatgctaaataccaattctctttctattatctctatagaaaagattttacaaaatcattctcagatgtagaagcaatttttaaaaattcagccaaaaaatagtagggtgaaaagtattataatgatagcaggtagttaattaatagcatgttctttttctgaattttatgatgcttgtggctttgacaactttaaacattttataattgtggaatttcttttgtcgttttacagaaatattcagttttgtacctcataatttgtatttataattttgtattcttcttcataaaaagggccattgaattgtgtttaactcatgcctcaccaaacctgaaccagcattttcctctgttgaatttctattgcctgcctacagcaaggcccacgtcttcctgtaacagttgcccccagttcccttaactatcaccagggagtcagcagttaatgacatgctcaaccttcctccaattacagatggttaggagagaaaacaaagccataaggccattaaactcatgaggttttgactggtggttcggaggtagagctggccctggctatatctgccgtgtacacaagaaccaaaaataccacacttcatttcagaagatccagatttgatcccacctctgccactggtgtatgatcttcagaaatgaacttggctgtccgaacttcaatccccttattcatacgatagacctattgtgatggccggcaagctgaggtatagaaacacatattatatagtaaggggttcttcaaatgtaatatctgttctcaattcctcttctctatcattaccaaggagccaatgatgcacagctacccatgtaccttcattgtagagacacaccctgaacaagcagacaacatggcgccacatcagagtattatattagaatgtgtgtttggcatttctttagcagaggggccaagtgtaggaagggagcgggtagaaaaggaggaccacaggtgacaagagtctcccctgaccttaagcttgcagttcccactgaaccaaacagaagccctgtatgcatctggaagtccttgcttagtgggctgtgcaatgtgtgttttaggggtctcaagccttcatcccatgtagccatggacaacatgttccaggaaaacattacttcctcacttcattacattccaagtgacatttctgcatcccttcttgacgaatgttgtccaaaattggttgtccctctctttgatccagctctgaccacagagatcagttttacatacttgggtacttccccttggtgattcaagaggaggcactttccttaaatagccttggaaaccttgagacagctgctgcatccatctatgttcattgctcaaacttcctgtatggtttgccaccaggcttaggttcaaatccaaaatcaaaatcttaacatggccacccaggcgcatgtggcctcagtaatacacagtttttgagcttcatctcaagcttctcttccccttactttgctctccatgcctgcttccagctcttctgcttcacccagtccttccccatccctcatgtcacacaggttagcttctgtgcccaagtagggtcctgcttcctttcacaaagctgactcccatgagctctccagagatgatctcaagtgtcacttttgtggggataactaccccagtgacaccctcctccagatttggttagcttctcccattccagcctagtttagatggaatcatattaagttgctggcattaatttattatgacctacaaaaccatcaatagtgtacagttctcacaactcccttgtacattgcagccctcatcaaaattgttatgaagtaattgatttgaataatgattaatatctgactccctgatggtttataatctttgtggaagtagacaacatatctatcttgtctactgctatttagcacatactaaataccacctagtaaatatttgtttaatgttacttatttaactgcagagatatactttttacattttctacatttaagatgcacacggaatatgcgatgttgtggagaaaagagctatttgccaaatggttacttgttactttatttttctaaggctttgggcataaaatgccattatggaattactattttattacaatggtatctgtagtactttggccctaatgttcttttttggttatgatgctgcactatgcctgtggaatacattctggatgcatgatgagactactgagacaatcacaatcttgtaagtttccttttcttctaagataaatctcaagcagagattctcttctcaggaagagtagaacttttcacaatctcgagccaagtaaacactctcaaattgcaatgcaaaagattttgcaaaatacttgaaaaaatgcaatttataaagcagaagttgtacagatgccatggaagatctaatgaaaaatcagaaaagattgcagcacagatttaactcttctcaagacagcaaaagcaccccacatgtgacagatactcatgagaacattgggagcctgaagccccgttttccagacaaggaaggaattacgggtctctgatcacagcagaggggccctcattagacccatcaaggattgcacgtgccctgtgcaaggccacatgcgcatggggtgtgcaattaactctgcccatgctgctgaagtttcagtccattagtctgagtgaatcttggtcatttgtatccctcttggtgcctcataaacatatgcctcatagtctgcatcttcaaactttttccatactgtaaaactgtcttcgcaaaatctcatcacaagctgaaaagtgatccctggtgataaacaactgagatggttattcacctccatgactagcctttcagggcctcactttctatatccatcaaatgggaagaacaatagatgcctcatcctcctcactatgttgctgtgagcatctgttgaagtagtggctattcgagtgcattgaaatgcatcagtcagtacacagatacaagggcttctgataactcatacctgaagaatttttgtcaaccctgaagggatttgcttcttggtatacgggtattaaaatactagtataatttctctaacgggagtatgatgtcactagttccagagtcttttcatagatggatgggttttatgataaataactcaccctcagtgttaacttggctttccaactagccaaacaggcctttgtggaacaaggttagcaaatagcatttgggcaaacgatcaaaagggtctccctctcttctatcactctctttatctctcttggtacctctctctgactttctctccctcctttaaaaagttatctctgttttttttaattttttttacattaaaaacaacaaatgggcccttcagaatagtcgaaaactttagaatgcaaagatatcaaaaaataagaaataacctagatcagaaaacagataaatgattgccaggggttgggattgggaggagttatttacaaggtgaatgaagaaattatgaggggttgtggaacttttctatattttgatcttgaaaattatataactatatacttgtgttaatcttgtagaagtgaacactaaaaagggtgaattttattataaacaattttttaagagaacaaaaaatgtactataatcccaccagccaataacacactattaacactttggcgtacttctgactagtcttttttttttttttttttttttttgctggtgtttcaaaatgtcattatgatcatataatacacaaatatacatatatgtgtgcatatagatatctacagatgactaagatagatgattgatagatgatagatcagtgaatagataaccaaactcaaaacaaaatagttaattcatgcaacttgcacaaaaggtacaagaaatatactatgaaaagtctccctctcccctttttccttgggcacctagctagttttgttttagtttttacctagctctcctgagacagtgtgcatatataagacaaaatatacatatacctcttttgtaatactaagacaccaaattcatacttctgcatcctgccttttttctttacttaacaatacatcttgaagatggttcaaattacacatatatagataatttttcatgactgatttttaatagctgcatagtatttctatattttaatgcactgtaatttatgatattgtattgacaaccacccgggttgtttttaatatttcatttttacaaataataatgtgataaacatccttgtacttgtgagatttcttttcctatatgggttatttatctttagtagagcttcttagaattggaattgtgaagtctaagtccacattttaagttttgctagataaagctacattgccccctttaaagttgtgccaatttttactccaactactgatatatcaaagtgtctgttcttgtatcattatcaaaattttaatatttaattatctgatgagtgaaaaatgacatctgatagtcctgtcagttagtattgcttttaatgtgactaatttttagcttttattcatgtttaaatgaataaaatgtactccctttactactttttttttttttttttttgagacagggtctcaccctgttgcccaggctagagtgcagtggcgtgatcatggcccactgctgccttgacctccagggctcaagcaatctgcccacatctgcctcctgcctgtgttgctcagactggtcttgaactcctgagctcatgcagtctacctgccttagcttcgtaaagtgctggaattacaggcgagagccaacttgcccagccctgtatttcctttactttgaactgcatttgtgtatccttggttcatgttctatttgatagccatttcttcttaattagagggatttcttttttttagattagaaaaactagcccttttggctatgataagtggtttatatttccttttgtgtgctacttgccttttgtctttatttggcttttttttggacttgcattatttatttaagatttacgtagttggatttctttctcctttcacatatggcctctctcacttcaatattatgtagaaaaaaacctctgaaataatgaattcctatacttttatgggttctttttttattttgatatttgacccatctggaatttattttggtataagaatgaggtagattttcaacaatttattccactaaatcataaattagtacaccttttttccataaatggctaaatagtaaatattttagacttcatggatgatacagtcttggggcagctactcaactctggccttgggcgaaaaagcagccacagacagcacaaaaaccaatgggcataactgtgatccggtaaagctggtgtagacacacaggcagcaggaggatttgaccctcagattgtagtttgctcacccttggtgcagaagattacttaattattctaacaaaattgatttagtaaataattttccccattgatatgtcttggttcctttataatacacaacattattttttataggtaggtcttgtacaaaactctccatttgattttattgttctgtctttctattcataggctgggtatgacactaatttggttactatagctttatgtatatttttaacattggatgaggtcagttgctcctcaaaactcttatttttcagaattttgtgcaggaatatctgagtatttctaattagattagaatgtcagaatacattcatggacatatgagtttggggttttttaaaattttttttagatatccttcaccttgaacatttattatttctttgtgttgggaacaatccaaatctctcctagatgttttgaaatatacaatgtattgttaactgtagtcaccctactgtgctattgaatactagagcttgttccttctgtctaactgtatgattatactcattaaccaacttctcttcatctgccccccacctccacccatctcagcctctagtaactaccattttactctctacctccatgacattaacttttttagctcccatatatgagtgagaacatgcaatattttgtctttctgtgcctggcttatttcacttaacataatgacatccagttccattcatgttgatgcatataacagatttcattctttttatggctgaatagtaatccattgtatgtatatacacatataacgtctgtatatataatgtgtatataaaatgtatatccataatatatgtatatatacacatatatgtaatatatattgtgtgtgtgtgtgtgtgtgtgtgtatatatatatatatatatatatatatatatatatatctcacttttttttttgagacagagtcttgctgtgttgcccaggctggagtgcagtggtgcaatctcagctaactgcaacctccacctctcggttcaagggattctcatgcctcagtctcccaaaaagctgggactacagtcatgtgccaccatatccggctaatttttgcattttttagtagagacagggttttgccatgttggtcaggctggtcttgaactcctgacctcaggtgatctgcctgccttggcctcccaaagtgctgggattacaggtgtgagccaccgcatctggcctcacattttctttatccattcatccattgatggacatttaggttgcttccatatcttggctgttgtgaatagtgctgcagtaaacatgggagtacaggtatcattttgatatactgaattcctttcctttgggtaaatatgtcatggtgggtttgctacatgatatgatagttctacttttagttttttgagaaacctccgaactattttctacagtggttgtactaatttacattaccaccagcaatgtataagagttcctttttcctttttccacatcctcactgacatttattactttctgtctttttgataatatccatccttactgagggaaagagggtatctcactgtggtttcaatttgcatttccctgatgattcgtggtgttgaacttttttttttttcagatacctgctagccaattgtatgtattcttttaagacatatctgttcattcctttgccctctttttagtgcttttacatatttggcttttgtttttttgttttcgttttcattttgctgttatgttgttcctggatatacaaggaactcaaactatagtcctttgtcagatgaatagtttgtaaagattttctcccattcctcagattgtctcttcactatgttgattgtttcctttgatgtgctgttagtttttagtttaatatggtcccatttgtctagttttgttttttgttgcttttgaggtcttagccacaagatcttcgcccagaccaacatcctgaagtgttttccctcttttcttctgtagctttatagtttcaggtcctaaatttaagtcttcaatccattttggtttaatttttgtaggtggtgagagattggggtctagcttcattcttctacatatggatgtccagttttctcagcaccatttattgaagagaccatcctttcctcaatgtatgttttcagtgcctttgtcaaaaatcaatcagctgtaaatacatgcatttatttctaggttctctattctgttccattggtctatacgtctgtttaaacaccaataccatgctgttttagttagtatagctttgtagtatattttgaagacaggtactgttatgcctccagttttgttttttgctcagtattactatgagctatttttaaaaaatacttccaaagaaaaaagtgcaaaagtttatattagcttactatagttttaataggttaaaattagtagcttctgagtaatgaagagagactgagcttaatttctcctgctttgaaagtacttctagggtctgggtgtggtggctcatgcctgtaatcccattgttttggaaggtcaagacaggaagattgcttgagccccagagttcaagaccagcctgggcaagatagcaagaccctgtctctaaatttttttttttaattaggcaagaatagtggtgtgtacctgtagtcccagctacttgggaagcttgagcccatgagtttgaggcaggagcacgctatgatcatgccattgcactctaatttaagcaacagagtaagtcctcatctttaaaaacaaacaaacaaaacaaagcaaaacaaaagaaagtacttctatttatttcttcacctgctaatttagcttgttcaagtgtagaagctggaggatgtttccctgcaatgacagagtagccaattttgtatctcctgattttttccttctctcattcttctttgctcaacagacactaaattgaggtttgtgtccttgtaaatagtagatttcatttaccctctgccacctttgtcaaaaaataattttaatttaaaaaatgatgtaaacttattttagcaaaattgaagactatagaaagctatgaaagtgaaaatttaaatcaccgtaacactgcactcagagataaccactgttaggacttttatttctttctttctcttctctatacacctgtaacatgcatgtacacctactgcatgcatatgtgtatgatacatgtgcaaacagtgcatgctaacattttctaccctgcttttccatgtgttatttttatcctgtgttccactattttggaaaccgtcagggttgacagagggaaattgatcaagccctttgtcttcattgatgtcaagagtttcagtcaacttggaggccgtggcctcctccttacaggcttcttcagcctttggtttgagtttgggttttttacttttcatttttggaggagccacgttctctctcctttcctattactggagagccgcttcctctcttcactcattcattgtgcagtgtgggggagtcaggacccagatgggaaagaaagcatcttgccacactcaaatctcatcttttttgccatgtttgccccatggcatttctctcagcatcttcttgtgctttttccaaaacatataaaggacaattctactctggaaagtcactgggatactgttctctgagaacaggtattgagaagaagatggtttcctcttggaacttggccaactggctcacagcgaacgtggtgtggactcttaccagctctctctagtatgctaagggcccccaaccagggaccctgaaggcatctcaagagagcagtgtccaggtctgcccttgttggaaggaggatgatgtgaggagatcacctttattaaagctgcaggttgtctgccagattttcaaatttcaatgtaactttttatttaaccaatgctgattaatagtagtggcattgttgaaatccattccccttcatttcattttctaatgaaatttcggatttctacacagacatggttttctggcataaaaagcttgcatttgcaacctgtcatattgggactgtgcagaacttttccatgttttaaaactcaggagaaagaagtaaagatggtaagagtgcacttgagcagaaacaaagggctgtgatcccaaaacaggggacaaatgagctgcaaaggagagacaccaagagcggagagcaagaggcaaagtgatatgaaagactccaaagtgctggttcagagaaaagaaaaaaaagggacataggtcaggaaaggggagaaggactgacatgaactggcaaatggcaacagatataaaaagccagctttctctggggagtggaaatgtttctaagcatttttgttcatgttagtatgatttgttttttcctaagtaagcttgaaaatcatagagtgaataggagaaaccaaagattagggaaaatatttttagaacaagctcagggaagtcatataggtttaaaatatatagtctatgcaaataatggcacacatttcagaatggaaacaaaaataagtggcagataatgtgtccaagtaatattggtagcaaatggactgttacgagagcaaatgatattttgcagagctgagagtgtgacctgtcttcaattatttgaatccctatcctacaaaagcattgaaaaaggaagatctggagccaatgactgtgtattacatatattttcattcagtacaagcagacatcatcagtgtgctatatactactttcattattattattatcttaattaaagctgtcttacgagccaggcgcagtggctcacgcctctaatcccaacactttgggagaccgaagcaggtggatcacttgaggtcaggagtttgagaccagcctggccaacatggtgaaaccctgtcgctactgaaaatacaaaaattagccaggcatggtggcaggtgcctgtaatcccagctacttgggaggctgagacaggagaattgcttgagactgggaagtggatgttgcagtgagccaagatctcactgctgcactccagccaggatgacagagtgagactctgtctcaaaaaaaaaaaaaaaaaaaaaaaaaagacaacaacaacgacaaaactgtctcatgatgaaatgggatgctttcactagccgtggttgctcatgcctgcaatcctagcactttaggaggctgaggcaggtgaatcacctgaggttaggagttcaaggccagcctggccaacatggtgaaaccctgtctctactgaaaatacaaaatttagccgggtgtgctggtgcatgcctgtaatcccagctactcaggaggctgagacaggagaattgcttgaacccgggaggcagaatttgcagcgagccgagattgtgccactgcactccagcctggacaacagagcagaacactgtctcaaaacaaaacagaacaaaaaaagaaaagggatgctttgtggaacagggagattacttgcactggaattgttcaagccaagttctatcaacatttgacacagaaacacatgaccatcgtaaggtctttcccagctcagcattctgtgactgcgtggtctttgtactgagttttacatgatatggatttcttaccttagaaggatcagtttttaaaagatgggctgaatgaatcaaatcagagaacactatttgcctacccaatatctagtctccacagctagctggggacactttatagccacgttaaaaaaacaacagcaaaaccccactgcatttctcaacttctgtagcagatggaggtggtcaagtgactaagttttagccaaagagatattagtgagaattgggagaaactttgagattccttaagaagggagacagaggatgctaacatggaacttgtcctttgccttcccattctcctttctgccatctggatcaggatatctggccatgctgaaatcatgagacaacatgaaggataaaatcctcaaactaagaatagaaatcagaacattaggacctggtctgagttcattgtggagcttccccagcccgctcaggctgcccccagtcttcccatttttagaaaaattaaaactatggtttgttaaagcttctattctgatggtctctgttacttgtagctgaacgcaatgaattgtgagatacgatttaccacaatttttttctttctttctttcttttttcttcttcttcattttttttttttttttaaaagggttgtgccatgtcacccaggctggagtgcaattgtgcgatcatgactgactgtggtgtcaacctcccaggctcaagcaatcctcccacctcagtctcctaagtagctgtgactataggcatgtgccaccatgccaggctaatttttgtattttttgtagagatggggtcttgctgtgttgcacaggctggtctcaaactcctggcctcaaacaaatcctctctcctcagcctcccaaagtgctgggattacgggtgtgacccagtgtgcccagcgctgtttactgaaatttttttttttatgattctgactatagctttaaacccaggctctgccatctccatgctgtttaacaagttctctgcccttcgtctgcctcaccagatgtattatgtataaaaaaaagtcacaacctagattgcagaatttcatgtaaatcgcttacaaaacaacacagatagaaggcagcaattggtgagtttgatctttggtgcccaaatacagctgtgctatttggtgtatacaaatgtcaccaaattcctgcacaaatttgcgggcgggataggggaagaaggaagggatgatgaaggcaatggacacaacagtctaaaaagttttaaaaaattgaatgtaggtaaaatagagctcagaattcctccaccatcatctgcatttgaatctggggagaagtcagccctcccaactttcacttcctactagaatagcaagacacactctgcctccagacagtgtggattatctgccacccgaactgaagtttcaatcactcaaatcctggtgtcatttacattgtttctactgggaaaggtcaggtgtctgcaggggctataagcaaagaaaaacccatcccctggaaccaccagtgtaaaggagagggaaggcgagtgacagcatgtgtcgatgctggatcattttcaggggtaacagaccactacatcctgaggctttttagcaaataggaagctgaaggacaaacatctgaaggagaaattaatctccgtgagtaggtgacaagctgcgataagcccttggggtgtgtgtcagtgtagcacagatgttagtgtgagaactattacttgattcaagggaaaggggagaagggcagggaggggggaaatgacaatgaaaaacaaaacagtgaaaaccacaatcatcttcaccaggcagctgatttttttaaaaaggcatatatccatcaaaggaacaaaacattaaaatacacccatatggcaaagacctggtgtaactggaattttcacctcctgattttgacagtgtaaatttgttcagcccttttgaagagcaatttggcaatgtgatttcagagccatagaaatatgcacatccatctttcaaatgtcccagctcttataaatgtatctttaaaaagactcaaaaataatttttttaatttatatgcctgaggtgtttatttcagcatctctacaacgagaaaaatgaaaaccgaaggtttgacatttgagacaatattaagtaaatcaatacatgctaatttaatgggatggtattaagtaaatctaagaccagcctggccaacatggtgaaaccctatctctactaaaaatacaaaaaattagccaggagtggtggcaggcacctgtaatcccagctactggggaggatgaagcaggagaatcgcttgatcctgggaggttgaggttgcagtgagccaagattgcaccactgcactccagcctgggtgacagagcgagatcctgtctcaaaaaaattaaataaatcaatatatggtaatctaatgggatgctatgcagcactaaaagtatattttaaaaaaaacttgagaaatgcttctaagatgaataatacacaattaagtcaattacctgacttcaaatattattataactgcatgtggacaagaagacaaaaccttcaaggaaaaaaagttttgatattatgagattatgggtaacattgtattcccagccttgaatttctgttattgttactataatatgtgtacaatttttttttagtgaagtaaaacaaacaagtaaaagaaaggttgaaacttcacaatgtagagatcaaccagcctgaacctctcattttacgggtgacaagttgaatacaaaacttcggtggaattgaacgggcttatttcagtggaaatagtgagaaatactcattttcccaagtgcctattagaggtgctgtcattttccaggagccaatagaaaaacacataaaagcagtgcattggtgtgatctgggctgtttctctgaaatcactcagctcgctttcaactgctgcgttccacaacacaatgtggttctacattaaccacattacatcataaagagatcattaaatgactccttatggaaagggagggaagaaatgatgtttagagaacctggtagtatcggaggcatcatcctccttctctgctgcctatctgtgtcgcactcactcttgaggttatgcaaagaaaatgttgacaatttaggtgccagctgttgtttgacgaatagcaaataaatgactgtgaagtcctttggaaaacagagcaaaaccaaattagtgattcccctcttctgcctcccaacatcttcacctccagggccttctttacactgactatatttcctctgatttcattgtcccaatgagacagtaatcctactgagagaacagatagggttcttggagactagaaattatgtttattgaatggttaaggcattgtttttttatcataagctataatttaaagttactaagaaaacaggccaggtctctgtaatgtagggaagcagagatcagattatcttctgggggatagtggaggagggttgtaaccaccccaagtccttgagtgaggatggaacctagggctcaacagcagaaccctaagaacggatatttttgcctaggcctaagaatgtcatcagcattttatttatttgtttgtttgtttattgagacaaggtctgcctctgtcacccaggctggagtgcagtggcgaagtcttggatcactgcaacctccacttccctggctcaagtgatcctcccacctcagcctcctgagtagctgggactacaggcacacaccaccacacctggatatagttttttttttagagatgaggccttctacattgcccagtttggtctcaaattcctgagatcaagcaatccccccaccttggctcctcaaagtgctgggattacaggtgcgagccaccgtgcccagcctcatcagcatttttagacagctacccctctgtggtactctgtggtgagaaataagtttaagagataagtatgcagttatgaggaaaggtgatagaaccacaccatttttatgaataatatactaaaatatattcttaaaaaacttgtcagttgtatatttgataatagcatatttttacttagtccttattaaagatctcgggaaattcaaatctgtttcatctttgatcaggagagaagatgttgcccatccttagcccagagttagaaaggagaaatcatgtgattggccaaggtggtgatgagagtctcttcagaagggaagacttccagttgcaaggtcaggtgacccaatcaactgcctttgaacatctggaaaaatcttctaaaactcttccttctcaagaagtcctgcaactggagctactaatgaaagctctttccagtagcccttacagctaattttctgttcacatatttgtcttctgctgtaaagagctgtgcctcatagtgtattaagggctggcttttcctttcattgtaagggactttccaccacaaacacaaggccaccatggccagcaatgcacaaaacagcagagtatggtcggcccttaaagacaaggtttgacttactcctctcttctcttttttacagacatgtttctctactataaacttcactcttagctttattttcaagaataaaatatttctgttttcaaattggcatcttacgattcagcagactaacccaagaaataattttatggaataatcatatttcaatatcttatttcttttcaaaggaacatttaaaagcttataaaactaggtataacaatgaagctgtaaaagaaagtaagaaaacacaatcaaagttaaaatgaaccaagctaaaaggtaaatataattattggtgttaggctccatatttgcctacaggcttcctaatattcagagcaaaatggaaaacaaactgttatcctagctcaggtcacagatcgctctggccattcccttttatctgccctgtgtgctttcttgggctcttcttctgttaacaggactctttttttctttggggaggttcttctccaccctctgcctagggctgtcaatcaatgtgccccatcttctacccttctgcataggacccccattcccttgacatggtgattttccagaggatgggtacctaggtacctggccaataagagttcgagatcaataagagtcttcccagaggttaatacatatgctttggaatggagtttattgcccactaaagatgctaagctggaaaaatataaattggggctatccattggctaaattccctgccctgaggagcaggcctgtctccagtgggaggaagaaaactgaacagaggagaattgcaaatggagagagagcaagccctgtgtactgagttctggcttctgtccctgaggccctgaaacctggctgctgcagcttttgattctgaccatgatccaagagtccttccaagcagtgagagcaagtaaattccattctttgattagcaagtctgagtagaactctgccacttaaaacaaaaaaagtccaaattaatacatctttcattattggaaaggaatcagaatatcagtttaacaaggagcccattttattttctaaaattaattttgaaagaattttctcacatgggacttaatagcgcatattgactgatgtaatggacaatgccctcaaccacatttttacagtaaatgcagaagcgaatttcatctgatggtttctagtataaaccttgaataaaagccaagggcataacattaaagcaaaattgagttaaagccattttggaagaattagcccagtgcacatagagtgttcaacatttgagtggctcaattcacccaagaaagcttcaagaagttgaaggacactttttaactttgacagctttcttcatgtgttcctttgtttccccatttacccaaacttctgataaaggttgaataacaagtattttgagattctaattttcaaccagagctaacattttccactactaagtgagaaagggatctaaatgcttcagagactgggggaaattagaggagagcaaagttatgctacttgtatctaaatataagaccacttgtctctgcacagaattgacccctgtgggacctttggggatacctgcaagatatgcaggctgtttttttctatcaataaaccttggattttcaacaacacaaaaacacatcatcaattagatccccagagtcatgaaccaaaacagttttcacatgaaatttattcaaagtaaggatttgtagttacctgttgtgatatgggaaaaccacacagcagcttggcttccagtgtgctttccagagtgaattagttttaaagtgtttattttctttattccctcctccccaatttcacccagtatctgaaccaatgtatccatcaaagtagtgtaatcagagagtctgcctagaaatgtattttagttaatcatggctaataccaagcccttctttctcccagaaatcaggatgatgtccctcttggaattacttttgatttgtgactggttttgatcatgattacacttccagtacctggcgtaatacctagaacaaactcccagtaaatatttgccaaactaatgatagaatcagatttatattttgaaatgagcactctgaatatattctagaaattgtattggatgaacacaaaagtagagtgggaatgcagatgaaaggctctgtgcccacccagaggagggccgcttgtggcttaattcaggcagcaataatgggaactgagagaattgagctggtttgagagatatttaggaggtcagttggtgttatgaaaagataagggagaaagaaggaacaaggccagctagacatgttgtggggcccagtgggaaatgaaaatgctgagtctctcattaaaaaatcattaggaatttcaagagggtaatagtagagcaccaaactgtgcattgtacaggacttttactcataaagccagctctaagaataaaacatcctatattcattatgcccggggcgcttccatttactcactgagtgcctaccatgacagccactgtggtaggtacttaattctacctaaaagcaataatacaggattaggatagaagcccaaatgaagaagaaaccaaacatagctccaatttatagcacctaagagcattttcacctgtaaggaattttttctatttttacaggaaagatcaagggatttgccctgattcttggagtacttaagtgcaaattttgaagcatttcaattgttgaaaacatatcttttttttatatactttaagttttagggtacatgtgcacaacgtgcaggttagttacatatttatacatgtgccatgttggtgtgcttcacccagtaactcgtcatttaatattaggtatatctccaaatgctatccctcccccgtcccccaaccccacaacaggccccagagtgtgttgttccccttcctgtatccatgtgttctcattgttcaattcccacctatgagtgagaaaatgcggtgtttggctttttgtccttgtgatagtttgctgagaatgatggtttccagtttcatccatgtccctacaaaggacatgaactcatcattttttttggctgcatagtattccatggtgtatatgtgccacattttcttaatccggtctatcattgttggacatttgggttggttccaagtctttgctattgtgaatagtgccgcaataaacatatctttttttaaaacttagcatatatctatttgccatctcctgggtcaaaaagccaatggaaagctcaatgaaatctccaaatattcttaggttcaccttgacagatttttttctgaagagcaaaagagactataaaaaaacacttatcaaacatgagagattatgccttaaaaccacttaactcttatttaagatactactctgaaatatgtagatctgaaaacagggaagattaaaactcattttgctaatgagggcttagcccttgaggactccctgggtaaaattgtattatgggcattatctgggtccacactctgccctcaataacaagagaataaaactctcctctggtcataggtggagaattagcagcaccttgacattttgaaagaactagtctatcaaaatatataacagggttgtgacaaaagaatgaatggaaaaatcctctggtaggggtaattgcatatgattgatataacaaattatgattcagcatttactgagctcctacaggatgccatccattgtgtcagatccttctgcatgtgcactgagttaaattctcactgtaagattgacatagaccttatcactgaagatattaacaaatcctatcagttgagggaaattcaggttatgagaggtaaagtggtttatccagggttgtgtagctggttattggcagagccagaacttgaagctcgatcaactccacctataggtcaatactgtcctaagatttctggatacaagtttctgtattttcaaggacttcgttcatgggatttccccgtatcatgaatacctctctcttctgaatcatccctaatgcttgtagacatgttccaatatccctcaccttcaaaaacaaaaagaagatgaaacaaaaccttcttccttactgcactgctgttctcatttgctctgctccctttcacagacctacttcttaaaaaggcatttgtcatcaccatctccactttctcacccaaatttatttattacctttttgcttctatctccacattgccaaattcagtcacttttctgttcttattttattatgtctctggcagtatccaacaaagttggccattctctcctgcttgaaatactttttttaataatatattttgtcatctataacaccatatatcctcggtcttcctcttacaatccttttcggttttcctcttaccatctcctcgtagattcttcttctggaatacttttgccagttcttctgtctttgcttaacgaataaatgtagagtgtttctggaaatctttttctatatgctctttttaggtgacccctccagttgcttggccacctgtgtgagccatgtatctatgactctcaagcatagtctctcccctggacttcagacttgaccacccaacacccaaccaccaccttgaaatccccacttggatgtccagaagatttctcaaacttcacactaataaaacagagtcctagatttctctcctccaatcctggtccacctcccctgtgcttctacatctcagtaaacattaccactctccacttaagaaccttaagacagaaatctgaattattcctttttacttcctcatcaccatactaactcaatcagtatgccctattgcctctacctgtgaaacatctaagtccgttcactttttaaaacattttttaagttttttgttaatgcataataaatgtccatagttttggggtacatgtgataatttaagacattcatctaatttgtaaagataaagtcagtgtacttgggatatccatcaccttttaaaagtatttgtctttttataagctagaaacattcaaattattcttttccagctatgttgaaatgtacaatagattattgtaaactatagtcaccctactgatccatgtaacgctagatcttatttcttctatcaaactgtatatttgtacccgttagtcaacttctcttcatggtcacttttatacatatccatttctttcacccaagttaaagttactatcctatcctgcccgggctacacatggtctcctaacttcaacctcattggtctctttcgatttcttaaatataccaagcagattctttccagcttggtgcctccaaggtaactgtttcctctacctggaacactcttcccttgatccttgcatgatttgctttgtcttgtcattccatgaaaataacttttactctgaaaagccttagccaagcccctaaagtagccccacagtcacatccactctcctgagcacttgttaccatctgattatgtttgttggcttgttcgtttgctgactgtttggaatataagcttcacgagggcagctgtgtaccctgttcaatgggacatcctcaacacggaggcagggcctggtacagcacagtcctcaataaatacttgataacaaaataaataatttatgttgcattttggaataataattatattcttagttacacattagctgtatctagaagactgataatactgggggaccaaattaccttttaaaattatatttaagcctactaaacaacaacttctgagttaacaatattaagacaaataaagaatgacatggctcacaattataaatcagctatggttaaagatactcttaaatagtaaaaaataatcaagaaaatgttatggatttggcctctcaaattatgaccctgttgaactatacaaaatataaacaaagaacaatatctgaaacattattgaaatttactttataactgaaagttagtataagcagttaaaactgaaagtaaatatagacaaaataattgaacatatttgacaaaatatagacatctaaaagtgaaaagcattttaaaagtgagaaaactcctagagagtttgaactattatatggtattttcacctttagattatgaatagcatgaatgagatgataacaatggtaataacaataaattcactataagttcttagaatttagaagataccattctagaagctttccatgaattatctcattaactattactgcagtcttatgaagtgagtattatgatcatttctaatcttatgcatgacaattgagatttaaagagtataactttccaaggtgacaaatttagcaggtgtcagaatccagttctgtcagaagaaataagtagaaaataaaggtgggtttgttggcgactagataatcataataaacattgatataatcgtttataatttttcataaccgtagaaattatacaacctgtgtaaagccaaaatactttggtgatttctgggttcagaagataatgccttttgtagctatggagcttagatcttgtagctatatgtgtttgactgagggaagtggaaattctctaactgggatatcataccaggatgatgaattacctgtgcaaactctcactattgcaaggtcctatctacctggaaatataagattaaggtttgcaaatccacttgggtaagtgtgtctcaagattttaacctatttacttataataattttcgtatttgccacctaagttttatacacaagactaccaaggaatagacataagttgcaagtggtcacagcttgacctgaaaacctatatcagtaaaccagtggagctctccttagaacagtaaggaaaagaagtgtaagatatgacttcagctgatacagtcagcaaatacttcttggatctatctgtcccatacactggtccaggccctggaaattgagcagaggtcaaataacccacttccctcatgaaacttacattgatggaatgaactactttttatatatttaaaataaaaataatatgaaaacttgaggtaatgaatgctgggcacagtggctcacacctgtaatctcagcactttggaagactgaggcaggaggatcatttgaggccgggagtttgagatcagcctgggcaatgtagcaagatttcgtccctactaaaaaaaaaaaaaaaaattagatgggcatggtggcacatgcctgtagtcacagctactcaggaggctgaggtggaaggattccttgagcccaggattggaggctgcagtgagctatgatggcattactgcattccagccttggtgatagagcaagaccctgtctctaaaagacaacaacaaaaacttcaggtaaaagtaaacctttctttcctttcatgtcagagaccacatattgcaatgagagtgaaatcacatgaaacttataaataaaactgcccttctatcagaatgaaagaaaggacaggaacaggtcaacttggttattttctctctagacccgtcattgagggtagccaccagagggctacctagccatacctaggtcacatacctaagtaacctgatacaaaactttctcctacctcctcctttttcccacctgtgaacctaacaccctgaaatttagcatctagaagtatctaaatgaagacagacatataatttttgcccctgagctcccacccttttggactggaattggacatatctctggagccacaaatcagagtcacatagatgtgactgccagcttttgtgacttggactcagtatctttttactgcgccaccttacgtttcactcagacaccatctggtgatggattggtccgtcatgcggtatcagtctgcagaatcatcttcagtactttaaggacagtgcagactagaggaaagattccaggttagatgtcagctatttgccaattagatgacctgggtatgtaatgagaatgcatagccccacttcgtctggtaaattgggactgtaattcttactttgtcttagcccacaggatgatatgtatagaaagtgagttataaactgtaaatgaagctgggcacagtggctcacacttgtaatcccagcattttgggaggccaaggagggaggatcacttgagcccaggagtttaagatcagactaggcaacatagggagaacttgtctctagaataaaatagaaaaacatagccaggagtggtggtatgtacctatagtctcagcaacttgggaagctgagctgggaagatagcttgaggggaggagttcaaggctgcagtgagttgtgattgcaccactacactccagcccgggtgacagagcaagaccctgtctcaaaagacaataatattataaataaataaataaacaaactgtaaatggtacaaatataaaagagcaatactaacgacaaataataatacatataatgaatgcattgataatgacagtgaaagttagaagtgattcttttagcacagagataagagattagctcatggctcaggccaggcctcacagattatctgtctcctggtgggactaatgcaagatctgaagtttggtctgtaactttgtcattttggtttgttctatggaccaaactctggagtactgattaacatcattgtctagcagttgaaagctctctgataaccttggggagtgctagatagaatagatacaattttgccttttgattttcctttgcccaaacaagtggttcacatatgaagatgtcttttggaagggaaaaataaaaattacagattcccatgtaatagggaaactgagtcttaaaatccaacaccaccatcttatttctaagtcgtttttacattagggcttgttataaacctaggttattttgttttgcctacgtgtaaatcttgatggattcaaaaattccccaagtaacttagtgagatttcaaaaagatccttgattttagcagcgtttttataaaactgtcagttacagtagataacaatagcaattctattctcctccattttaaactggaatttactgattcaaatttttaagagaaaaagttcctgaacttgtccccttattctaggggaaaccattttggtgcctgtctatagctacttatggcctctctctcttgttttttgagacggagtctcgctctgtcacccaggctggagtgcggtggcaagatctctgctcactgcaagctccgcctcccaggtgcatgccattctcctgcctcagcctcccgagtagctgggactacaggcgcccgtcaccatgcccggctaatttttttttttctctatttttagtagagacagggtttcaccatgttagccaggatcgtctcggtctcctgactcgtgatccacccgccttggcctcccaaagtgctgggattacaggcgtgagccaccgcgcctggctggcctctcttttttgaatgaggtaaaaaagaagcttgagaggcaaaacaaccaacagcaaataaccctagtgtattcattcattctcacactgccataaagaaatcctggagactgggtaatttataaataaaagaggtttaaatggctcatggttctgcaggctgtataggaagtacagtggcgtctgcttggtttctggggaggcctagggaaatttacaatcatggcggaaggcaaaggaggagaaggcacgtcttacatggtaggaacagaagcaagaaagagagccaggaggtgctacacacttttacaagaatttactcaccgtcacaacagtaccaagggggatggtgttaaaccagtcaagagaaaccacccctatgatccatcacctcccaccaggccccatcttcaacactgggaattacaatagaacatgggatttcggtggggacacagatccaagccatatcacctagtaatcatcctcaccttcagttaaagcagcctgtgtgtttactgaagaaattagctacttgacaccaatcttttcagcaatactgctgtcagataagagaatcattgagtaaaatgccattaattgcaaataataaaacgtcattcattcaaatcacgtaatgagaagtttgaattctgtctccaaaaccaacccttacttttgtttatttatttttacctagtacccagggcatgattctgtctatgctgtcataggtctttagattttagttgccattagcaggcattttcattcaatttatttatttatttagagacagagtctcactctgttgctcaggctggaatgccgtggtgcagtcatggctcactgcagcctcaaactactggcctcaagcaatcctcctgcctcagcctcccaaatctgtggaactgcatgcatgtgccaccacatctggccctggaatatgattttataagaaagctgtctctctattaaagttttatgcaaagaggaaaactaaatcagtggacagagctaagagttagacgacccagactttcctccctccgttgcctctgtttctgtctttgcaaaataaggaaatttgactagcttatctttaaaacctctacttgctcattctatgatggtgccttgagatggagattcagtgagagattcttgtttcagtgcttttatatatttaacaaattttcaccgagtacctattacgtgtcaggacctgctctaggaaatgtggatacaacaatggacaaaacggacaaacctatgtcctcatgtagtttacattctaaggcctataaagtattgtctatttgaacacataaaatgtattctcccagtttgggcagaaacaggacttctgcaaggcctggagaagtaaggaagactgaagcaaatggaatccatggcactttccaattttgtactttctctttctgtctctccttactttcatttcttgacctactcctagacccatgcagataccaaattttacaaattttactaccagcaaatagttatctattatgcagttaaactgtgctatgtgtagggatgcagagcaaatcaagacatagcatatgccttcaagaagccaatgatgtccttgtgagaacaaaactcacatatgtaaaaaaaaattgctagttcaaaatgtcagaggctgagaaccaggaatatggcctgaacagttgtgtgctctatcaggagagattcactaaaagttagtagacttcaggaataattttcagtgcacataaagcttgaacttaagtaacataggtagttttcagattttaaaagcaattttcagtaaatacaagtagagatatggcctgcaaaataagagtaggatatagcaagacacatttcttattcttctgacaaggtagtacacagttcatcactttattgacaagatttattgatgtgactattgtgatgtcatcaacaatggctttgaagttcagaacatgagaaagagctaatggtagggactgacttgaaagcctttgcattctaagaatgatgattaggtttctaatgtattattaaataatgtccagcccacaaaaaagatgaagtctgcaaaggtatacacaataactctgtgccttgctatggtcctatctgatctcaaacaagaagctctttgggttgtgttgctggtggttggatgtgttctgagccatagctaggcttatgcacataacaaagtctgattcccaggaatctttttaggaaacacctcccagattaagtaatatttacctacttgtcctctttgaacagtgctcctactgattctttaccctaatgaagttcatgtcccaacccacacccttttcctaaaacaattaagcttttagtggtgacatgatgaaaaagaaaaaaaaaaaatagatgcaatggctgacttttggaaagttcccagcaaaaaaaaatcccggtggctttctgagtctcagcatgtttcttcttagttctgtgtacactgagataaaagtagagtgggagactgagtttaccacctgtgctaaagcagcagctgttagcattggtgacattcattgttacatggatatcaattgagctgggattaggaagccgcctgtctcctcaagcttgttacgattcagtcacttggaaaaaaacaaaaacagactttcggatgaggattctaatgcccaggtgacctgaaagccaggttcagcgtagtcaatgagcaacatgaaatgaaatttccaatcagaattctcattagccttattcagcactacccagatggatgttccttttgatgtctttgtcatagcagcctcacctatgcaaatattgccagtattaccccttatagtaagttgaagaacttttaagggttgtgaactttacataggtaagtgaatcaagtatacttgaagagcctctctgttgacataagtaattagattattggacaaagatctgatctagtaattttcttagtatgtatgtgtgccaaagccaagagaggatatgttattaattagcaagcaaaatttctaacgtaggggttttcccacatcttaagtaaaattctcgaaacctggaactatggctggctctctggaggtgtttcataaatgcttgctgaattaatgaatgtatccacaggcatcttttaagtggctacaatgacattaagaagaaataaggtcacagagtgtagttgccgcctcaggctctgggaaggatgggtctggaaacaaccccacagtagaccatacacattgtttttgagactttcagctcatccatttggttactgattacaagacggtttttttttttcgtctcaaaaaatgctttatttctcagaatcccatttcagcattattggtttttccctcaccaattctattttcagctttctgccttttctcataatgacctgtaggtgataaattagtaataataaaaatcaataaaaaatgataaagttttttttgggggggaaataggaatgagtttcatgttaagaaaagaaggaacgttccagatggaattttctgtaatgttaaatgtacccatatggcttctgggaaatttaggggcatccttttgtattagggtaacctaatgccacctgctttaaaaattcatattaggaaatagccacattttgaccttcttgaacgatgttcctttatcaatcaaaaatataaagggtgttttatttattagtcattgttgaaatccgtaatctctttctatcgccaaattgtcttaaaacgtctgtccagcacatcattgcaaccttgactgtcccttccactgtgtgttgaagagtcacaggtcccagggggagctgcgaagaaacgtaaaccaaataccatttcagtaactgttaagggacaattgtgacgattttgtaatgcttggcatgttttgcttataatcttgtcctacaaagaagcctatcagcagagatgagagatttttgctatgcaaagattagattaatattgatatttgcagaactgggttcaacctgtgggagacctagtcgcaggtcttgtagaatttatagcatattaagaagatatttaaatatttggcttcagtgtgatggcctcatttctacatacctttctaatatgtgccaactctctcttcttcatttcacttgtccgctgaaagatgagtcatcaagtctggttgaacctatctaatatctcttgaatcagtatgtctctgcatctgtattgccatcaccctagttctggccatcctcactgaccacctgactttctgcctaaatggtctcctactttctggtcttgtatactttcaaccctttctctgcaatcagagtgatattgcttccaatgttgtacagacaattcttacaaggtcctgcagcttttctttcagtctttctttctttttttttttttttttttgaaatggagtctcactctgtcacccaggttggagtgcagtggcgcgatctcagctcactgcaacctctgcctcccaggtttaaacgattttcgttcctcagccttccaataactggggttacaggtgcatgccaccatgcccagccaatttttgtatttttagtagaaagagggtttcaccatgttggccaaactggtctcaaactcctgacttcaagtgatctgtccaccttggcctcccaaagtgctgggattacaggcgtgagccactacacccagctctttcagtcttactgttcgtcatttttttccctcccctttctgcaccctcttcactctgctttcccattctctatgcctgggctacatcttaaaagacgccatgttctcctggggtctctggtgtccctgattctggaaatgctttcctgtctcttctctctaacccatttcacttagataagtcctatttatccttgagatttctcataggtggcagtctttttcccataagacttttcctgttctagacctggtggctcacacctgtgatcctagcactttgggaggcacagccagggcgaatgaacccaggtgtttgataccaacctgggcaacatagtgagactccatctctacaaaaaataaacaaccaggcgtggtgatgagcacctgtagtccaggcatggtggtgagcacctttagtcccagctactcaggagcctgaggtgggaggattgcttgagcctgggaggtcaagacttcagtgagccgtgatcatgccactgcattccagcctgggcaacagagcgagaccctgtcttaaaaaaaaaaaaaaaaagaagaagaagaagaaaagaaaaactttccctgatatatttaggttgagactagacaccctcttatctgctcccacaatgcccacgtcctccatcactgtactgaccatactctggtaattggctgtttatctgtccaatgccttccctagaccagaagctcctaaaggacagagcctgtattcccattcgtagtaccagcgttcagcacagtagctggacctgactaagcaccaagtaaatatttgttgaattaagaaaattaaaaaaaaagtgagaagtcaacagtctcttaatcaattgtaaagaaacactttactaggatgttctgacagctactccaaagtatcaaatattttaagtgaaattgtgatgtctggtgacattttttcaatattttagatttcttacacacaacttattttattttcatccactgaagctctcaagcatcttgttaaaataaaataaattagcttggtttctgtatgtgtgtgtgtgtccttttttggggggaggggggctggtggcaggacagggtctcactttgttgcccaggctggagtgcagtggcaggatcatggctcactgcagcctctacctcctgggctcaagtaatcctcccacctcagcctccctaatagctgggattacaggcatgcaccaccatgctcaggtagggttttttaaatttttcatagagacaggttcttgtcatgttgcccagtctggaatatatatatttttttgacttttattttaggttcagtgatacaagtgctggtttgttatatagataaactcatgtcacggggatctgttgtgcagattgttttgtcactcaggtactaagcccagtacccaatacttactttttcttttcctctctccaccctgaccctccacgcccagatagacaccagggtctgctgttcttgtccttgtgtccatgtgttctcatcatgtagctcccacttaaaagtgagaatatgtggtatttggttttccattcctgtgctagttcactgagaatgatggcctctaactccatccatgttcctagaaaggacatgatctcgttcttttttatggctgcatagtattccatgctgtatatgtaccatattttctttatccagtccaccactgatgggcatttaggttgattcctatatattttttaattgacaaaaataataacccacagaatcactaagtaggggaaagatcagctgctgatattttggatgtacttttctcgagtccaaaggataattcagtcaacttaaaatagttatttaaaaatgtgaacagaatttgtggatgttgagacagattcacagatccttaggaaatattaaaacttttgaaaaatggccacaggctctgaaggaaaagagcagttgggcacttaatgccacaagttactcttataaatcattatgctaatgatagaactgaggtggttcatttgggaaaaaaattgaaataacatttaggaaaagctgagaggctggcgatcaccattatgaagagagcagcctgcactatgattagatgccaccaataaggggaccatatataactgaaggatgactttaggagtcattgtaaacctgtcttctgacagcagcttgagacaggaattgcattcttcctctaaatccttttaatttagtaaagccctttattgaaacatttacaagcaaatgtaaacttttaaggattcttacatcccataaaagcagtaattttggcatatagctcatcaacatgaaatgagtaaaaacatgggaaggcagtactttttgaatgttgtatgccatttggcaaatctacatgttcctcccttttttcgcatctccatgttcctcctaaatgaaggagttgttgttgatgttggtttactttaatatgtccaattataccattatcatctatttatcaaaatagtgccatttaattgccttttgctttaagctgtattttatatgaaagattcctagtgttatttctgtcctttggaatattatccagcagagggaattttaggatctacttgataatacagatttgctaatttccacgttagtacttcagtgttgtttagttacacagtttcgggcctcatgatgtgtttgatgatttgggagtgataaaatgagtcttaagtaaaaatcttttaattaaaacaaacaaaggatcagtttttatgggaaaccagtcagtcagcaagtacatgtgttttaagtccagaaggatgctcaagtggaggggtagagagagagagcccttgggatccagggattgtagagtaactgctcccattatgccaggcctagcagggctgtcccactgtctctgccctcacactgaccacttcattactggttgtttttactgagcatcttttcagagatttctgagaacatggtaattttcccagaccatacacctgagagatcaggtactatgttgcctttaaaaacaacaacaacaacaacaaaaacctttatatttttcctctttttatggtgaaatatggcatactttattatttggagaaagacagaaaacatggtttttttctcccacaggccacaaaataccatcttcctcttacagggaatgagacttttgtataaagaggcacaatttcctgtcccactaggagaaaattattctcttgtctgagtctcaacagaagcttgtgttagttgctgttataaattaaactactactcaacccagcagtcccattactgggtatatatccaaaggaatataactgttctaccataaaaacacacgcatgcttatgttcattgcagcactgttcacaatctaaaagacatgaaatcaacctaaatgcccatcaacagtaaacaggataaagaaaatgtggtacatatataccatggaatactatgcagccataaaaagaacaaatttatgtcctttacaggaacatggatggagctggaggccattatccttagcaaactaatgcaggaacagaaaaccaaatactgcatgttctcacttacaaatgggagctaaatgacgagaatacatggacacatagaggcaaacaagagacactggggcctattgagggtggagggtgggaggagggagaggatcagaaaaaataactgttgggtactaggcttagtacctggatgatgaagtggtctgtacaacaaacccccatggcacaagtttacctatataacaaacctgcacatgtacccatgaacctaaaataaaagtttaaataaataaataaacttggtctccagtgttaaatatgatatgtcatcatcctcatttccttcatccagctattttatattcctcccatctgctctgtcctaatatttatattctgtaggccttatcgtgcatctcttattccttctaaatatgttttactctgcctggttcctccactcttttggctcttgttttcctacttcctttaatgtaacagtaacacagtgagcacttaatagcagtctagaataaactctgtgttcctgctttaatctatatctggtctttatctctcacctttatctttacctctgtcactgtgtggacttacactgaaaacagaactataccatgcccccatctccatgctgagtagctggtttataaatcaggagagacaatgctctttagatattcttaaatttgttataattctttcctgttatccagctcctcaacctcccttcccagctctgtctaccactttgtatcacttaagccacgttttatctacgtcttctctgtcactaacctttagtcccttgaaacaggcacaaccaaacaggactgacattttgcaagtcccttgagattttgcctaatccttcacagcaacctacaaagtcaatctggggctggtggaaattctcctctttcagccttttccttcttttggaatttgggggtgttttcacagagtgatttaccaagaaaacattctaaatcctcaaggatcacttatcccttacctcgtggttgtttgctcgagaccaagcacaactggacatttttgaacttacgtctttctccctaccctctttgttctccttctcccccttcataaaatctgacttcagtttggccttcaagtgagattgacttttagccccttccatttggcaaatccttcaacaaaaaaacagaagtgtcatttttacggggtgacaaagcattaagaagatcgctttttcagccttgctgtgcttcattataggtaagtcctcatgtggcaccttttacaagaggaagtattgtcatgctaacaaaatggtttcagatagtatgaaatcagtggtgagaagaatggctataaggaatgggctctacaattactgtcactctcagcaaaagagaacgcaaggaatgcatatttcatctcatggcgacctgaggatcgtcctcaattccatatgtaatactttctaaataatggtgacctttttcacgtccccttcctgtatatacaaagtactatgtggataatgcagcctgagtgagcttatgagctaatgcagggatttttattattaacaataatcatagtgaacaacagtttattcatgtaagatcaagcaactagtaagtggtagaaccaggactgggtcatagggtaggtacatgtgtaccacttttaaatattgccaaactactttgcaaagtattgaattattttacattcccaacagcagtgtctgggaattacaataatccttatcatgcaatgactggcgtattcattctttttaatttttgacattctaatctgtgtgtagtgccatctcattgtagtttgaatttgcatttcgctagtgactaatgatattgagcatcttttcatgagcttatttgcatatgtatgtcttctttgctaaagtgtctatgcaaatcttttgcccatttattaggttgtttgttttcttatattgagttataactttttttttttttacatattctgcaaacatttttaaccagatatgtagtttacaagtgtgttttcccagtctgtttcttacctttacattcccttaccagtatcttttgcaggaaagatgttaaatctgttgaagtgtagtttatcaagttttttctttggattgtgcttttggtcttgtagctaagaaaactttgcccaaacaagataacaaggattttctcctatttttttctaggcatgttatggttttaggttttacctttatgtctatgatccattttacattaatttttatatatggtgcaagttatggatcaaagtttagttacatgtggatatccaagcatcctaagcatcttttgcccaaaagataatcttttttatactgagttacctttgctgctttgttaaaaataaattgactatgtgtaagtctatttctggtatctctattctgttctattgatctatatatacttatccttaaaccagtaacacgctgtcatcatgactttagctttataataaatcttgaagtctggtaaattaagtcccccaatgtttttctttttagacattttttttggctactgcaggttctgtgtattttcagaggacttttaaaatcaacctgtcaatttctaataccaaaataaagttctttagaattttgattgggattctcacgaatgtgaagatcaacttggagaaagctaacaacttaatattgagtcttatctctcaacttattttggttctttaaaacttctttcaacaattgtttttcacatagagatcttgtatatattttgtcagagttcgcccaaatggtacatttatttatctatttatttagagatggagttttgttcttgttgcccaggctggaatgcaatagcacaatctcagctcactgcaacctccacctcccaggctgaagcgattctcctgcctcagcctcccaagtagctgggattacaggtgccagccaccacacccggttcattttgtatttttaatagcaatggggtttcactatgttggttaggctagtgttgaactcctgacctcaggtggtccacctccctcggcctcccaaagtactgggattacaggcatgagccactgtgcctggcccaaatagtacatatttttgatgctattattaatgacattgttttattaatttatatttcaagttgtttatttctattacagagctttctctactatgctgacatccatctgaggtctcttctcaacagaattgcctttaatgtccacatttctaccaagcttctcttcaaggaaatctatattttttctattactcaccttaaaattcttgtagcctctatccatttcccaattccgaagccatttctacatctttaggtgtttgttagaggagtaccccactttctcgcatcaaagtctgtatcagtcagtgtttgacagagaacagaaccaataggagatggataaataggtaggtaggcagattagtaggtagatagatagataggtagatagatacatagatagataatctatagatatctaatgcctggaaagctaatttttctatatattttctctattattttagttgtttcagatagaaggacaaattggatccctgttactctatcttgaccagagtgaaaatctgattaacttttaatcctcagtctcctcatttgtaaaatgaaaataataataaaatctatttcatgaggttattgggatgttagttttgttaatatgtataaaaacttggtgccttgtacataataaatactcaataaatgtatttaaattttgaacaacatatttgacatattgtgatttccaagtatctatactcttttatgtttgttaatgttatatatggaggcaatctgacttaacatcaaaaaaaaaaaaaagaccattcataagatgtagtcagtaccagtaaatgagagcacattttcctctaattgggtgtgtggatattggttttcaccctacttggagtttctgactatttgtcctagtgaccatcactatattcatttataatattattaaaatcaatggatgagtcattggttaccatgtgtattccggttctgaaacacaccctcctcttccccagccagcactcacctcagtgatacccagtctattgcaggttttttatgcattttctaaattacatgaaagcaagttgacattctttctttgtcttagtcttccataccattattttggcatgtttaaagtatcatccatctgattatgtttggaaataaaagcatgaatttgttaaagacatgtaccttccaaactgcacacttattgtgttttcactttcttatcattgtcccttcattagagaaaaaaatctattctgtgaagtatttggttttttatgcagtctgctctgctctaatatacacaaacacctgattctgcaatgagaattagttggtatgtgattgttgagcagggaaatagtactatttcacagaatttcctttagtttatatatggatttttcttggctgaagaagccagattactggagtaaaattataatctccagcaaaaataaaaaaagaaaagtccacagctcagcccctcctctaaagagttgtacagcgcagccttccacggctcatagcttacagcaggtctcccttccctgccaccaccctcacagcaaccccactggctgagcactctgtttttatttattgtctgagcactcatcagtgcagctctgtttaacatgttacctgtatttccacccaaattttttttttttttttttaagaccaggtctcactctgttacccaggctggagtgcaatggtgcaatcttggctcactgcaacccctgcctcccaggttcgagcgattttcctgcctcagcctcccgagtagctgggattacaagtgcccgccattatgcccatctgatctttgtatttttggtagagacagggttttgccatgttggtcaggctggtcttgaacccctgacctcagatggtccacccacctcagccttccaaagtgctgggattaattacaggtgtgagacactgcacccagcctctaatattttttagaacatccattgtggtagcctcctgccatgctgaacagttggcctgggtggtgcaagttatctcccaattattgggaggtatcaattatcatttttgtttggactttacaaagttttataggttctaagtgatatatcccttctgcagtttttctcataagttctgtttatacagtatgtgattttgcagaatatgagttttttgagattatatatattgcaatatcatagaaacctttttgtttgataatctttgcttaaaataacctcatttattttgtacgaatgtacaaaaataaaacaatgtagtacttattggctgtttttgtggactgaggtagagatgtcaagaagttcaagccaaaaaaactgaaaatagttaacagaaacaggcaaatctcatatatcttgccctgattattttttcattagagtccctcctattgaggaaggttcattagcatgtgatgaaacacattgagggggattaattaggaaatataaaagagtctcaaacttctgatataaggtaaaacacgttaattttatgtgtctttaaaaatgtaattagaaccttctgtttgtcttttctgagacacgtatttaaaatttccctcgactcaactgataatctgtgattttgattttcatcccaaagtgacttttaaaaaagttttggggttagggggatgtggtggctcacgcctgtaatcctaggactttgggaggccaaggcggggcagagggcggcagatcacctgaggtcaggagttcgaggccagcgtggccaatattacaaaaccccttctctactaaaaatacaaaaactagccaggtgtggtggcaagtgcctgtaatcccagctacttgggaggctgaggtaggagaatcacttgaaccccagggcaaaggtattagtcagcagagattgctccactgcactccagcctgtgcaacagagagagactttgtctcaaaagaaaagttttgggtgaaaagtagaaaaaaagtcataactttgtgtagagacttttccctcctgtaattctttttattatcaaatatcaggtattatagggtataagccagtgttcttttttatgatttccagaagtgttaaattttccatgtcttctgcatttgaaagtaataggtttggaaagagaaaagctgttcattcttcaagtacatgtaagtttaagtaccttgcagactttgttttgcaggaagcttccttgccttctccccatatcacctctctgcacctcttcacacccatgagggtctttatagcagtgcagtccataaattgttttgaggtaccaataccagtttcttggatattttcttacttaggaacataaatacttaggctgccattgcgttaataaggaaatgctggatagtcagaatcctacattaacccgagcctaaaatctgtagtatcgcttcaaatatctatgtagaaagcatagtttattaaactaaacatctcctgtaatcccagcactttgggaggccaatgtgggtgaatcacttgaggtcaggagtttgagaccagcctggccaacgtggcaaactctgtctctaccaaaaatacaaaaattagccaggtgtggtggtgcaaccctatagtctgagctacttgggaggctgatcacttaatttaaaacttaaaagacctaatatccagaatctataaggcacttaaacagattcacaagcaacaaacaaacccattacaaactgggcaaacgacacgaacagacacttttcaagagaagatatacacatggccaataagcatatggaaaattacccaatatcactgatcatcagagagatgcaaatcaaatccacaatgagataccatttcacgccagtcagaatggttattattaaaaggtcaaaaaataacagatgctgacagagtaaagggaacgctcatacactgctggtgggactgtaaatcagttcagccgttctggaaagcagcatggcgattcctcaaagaacttaaaatagaattatcatccaatccagcaatcccattactgggtatgtacacaaaggaatacaaattgttctatcatgaagacacctgtacacatatgttcatcatagatagcactgtccgcaatagcaaagatatggaatcagcctaaatgcccatcaacagtagattgaataaagaaaatgtggtacatatacaccatggaatactatgcagccataaaaatgaatgggatcatgtcctttgcaggaacatggatggagctggaggccattatcctaagcggactaacacaggaacagaagagtaaatactgcatattctcactcataagtgggaactaaacaatgagaacctatggatacatggaggggaacgacagacactggggcctacttgagggtggagggtgggaggagggagaagatcagaaaatatacctatagggtactatgcttattacctgggcgatgaaataacctgtacaccaaagccccatgacacgcagcttaccaatataacaaaccagcacatgtacccctgaacctaaaatacaagttaaaaaataaatacataaaaatttaaaaataaaaaataaaactgcaaacgtgccctgctttctggcagtaccccattccctgttccttagttttctctctggcacttatcatttatctattttattcattgtctgtctcccttcactagaggttcatgagggcaaggattttcatgttctgtccactgctatgtccctaacacttaaaaaaaggctttgcattctatagtcattcgatgaaataggctgaatttagctaaaagggagttcatgtcctttgaagaaacatggatggagctggaggccattatccttagcaaatgaacacaggaacagaaaacaaaataccacatgccctcacttatcagtgggagctaaacaaagaaaacacatggacacaaagagaagaacaacagacactggggtctgctgagggcagaaggtgggaggagggagaagatcagaaaaactacctatcaggtactatgcttcatacctgggttacaaaataatctgtacgtcaaatgcctgtgacacaagggtacctgtataacaaacctgcatatgtacccctgaacctaaaataaaagttgtttgtttggtttttttgtttgtttgtttgttttgagacagagtcttgttcttgttgcccaggctggagtgcagtggcgcgatcttggttcactgcaacctctgcctccttggttcaagcaattctccctgcctcagtcacccgagtacctgggacaacaggcgcctaccacaacgccaggctaatttttgtattttttagtacagatggggttttgccatgttggccaggcttgtctcaaactcctaacctgaggtgatctgcccacctcggcctcccgaagtgctgggattacagttgtgagccaccacgcctggcctaaaagtttttttaaaaagagaaaacactttccttaccctttgtagctcattgtctatctaacacaccctgtcactctcatcagccttgaacttcttacaaagccattcaataaaatgaaaggaaataggtgcagtgggccccctctgattcgtggctttgatttctttggtttcatttatccacagtctaaaaatattaaatggaaaatttaaaaaaaaaacaattcataagtgttaaattgcatgccattctgagtagcgtgatgaaatcttgccctgtcccactctgtcccatgcgggacatgaattcttcccctttgtccagcagttcctcactgtctatgcctccgacctgttagtcactcagtagccctctcagttattagatcgaccatggcagtatgggggtgcttgtgttgaagtcacccttattttacttcctaatggcctcaaagcacaggagtagcaatgctggagatttggagctgccaaagagaagccctaaagtgcttcctttgagtgaaaactcttaataaggaaagaaaaacattgaatgctgaagttgttagatcttctatctgttgaactgtgaagaagaaaaaagatatttgtgcatagtatataaagggtttcgtactacccacggtttcaggcatccactgggtgtcatggaatgtatcccctgaggataaggggggattactctatgtattttcgtatccttacatcacttacattatttttcctcagccttgttgaggaaaataaaaacacagaagccaagaaagaaatgagcaagcactggccgggcacagtggctcacacctgtaatcccagcactttgggaggccaagacgggtggatcacccaaggtcaggagttcaagaccagcctgggcaagatggtgaaacgccgtctctactaaaaatataaaaattagccaggcacagtggcaggtgcctgtaatcgcagctacttgggaagctgaggcagagaattgcttgaacctggaaggcagaaaagttgcagtgagccgagatcatgccactgcactccagcctgggcgacagagcgacactctgtctcaaaaaaaaaaaaaaaaaaaagaaagaaaaaagaaatgagcaagcactgaacacctactgtgtgcaaggcacttgatagccttcctgttatttcttcctcactacaatcccatgaagtagttcttatccccattttacaagatacaaaaattgactctcaaaaagcttaagaaatttgcttctagttgcacagtcttatagattttcacttttataagataaaagagcttattcaaatccaagtctgtttgaacctgacaaggaaagccttctctaaatagagtatctgaatccctccctgctcgaaagtctcctttatacgctcatgtttcaaaaatttcacattttttgagatatagatagtacccacccacatcacctctgtttttatggaaaatttacacttaagtggcaattattttaatcagatcgacatcctagagagtgagagttcattgaggaaagaaggaaggtacatttttggatcataatgaggagagatcttgatatttttgaaatttgttttgtcttcccatggtacaaagttttaaaagtacaaaaatatgaacagtaaattctcccttctctcccatccctgtctctagccacccactcctcttctgaggcaagagcagattctgttgccaccttcccaagcaggtagtgcctttaaaaaacaaaaaacaaatgttcacctactatatgcattaccatgcaccttacacttttcatttaataaatataccccagcaatggtgatagcagattttggaccagcagtggggataaagaaggtcctggtcacctaggtgcctaaagagaagcagatgaagagagaagaccctggagaaatgttttcctgttttgcacctgcaggtgcttgacatgcctctgaaaatgatctcagtgctgtgcagttccacagctgcagtggtacccacaatgccaaaacttgggatgcaaaggggcgggggtaatgacaaaaatcagggaaggaggaaccatagcaaccacctgatctgcacactcatgtattttatatacctctcttcaatgcctagtgtccttagacagtaagctccctgaagacacaggctatgcctactttattcatcatcgtgtcttcagtgcctagcaccctgcttggtatgcattcggttcatgaatatatgagggaacctgctgctgctgttcagcattcacacctccatttcaaccccatcagaacctttttcatgcttcctcttttgtagtgtctcagaaactcattctgttttcttcttcatctttttttttttttttttttaatggagtcttgctctgtggcctaggctggggtgcagtggcatgatctcagctcagtgcaacctccacctcctgagttcaagcaattctcctgcctcagcctccctagtaactggggctacaggcttgcaccaccacacccagctaatttttatacttttagtagagacagggtttcaccatggtggccaggcttgtcttgaactcctaatgtcaagtgatccacctgccttggccttccaaagtgctgggattacagatgtgagccactgtgcccagccttcatcttcatcttaaaacttcttccatgttcgctgtggctggggacatgatattcctctttccctcccagttgctcctaaggatgagcaaaaagctcttttcacgtcaggggttgtaccgccaatcactaaaaggaacagttgaaatatcaaacatggagaaattgcagtgattacaaaggaatgcaatggggcaccatacagatctgaatttgccagtttgccatatccaggctgtccctgttgcctctggtccaccttaagctaggtgcaaacccagttggaggaaagaaaggaagttatgtgttctctcttcaaggaagaaaccagataccagcctcaaactcttgttcttaggtcacttctttccttggtccatttcactcctcactctccattcaattaaaggacttgcagattaggttatttgcaagtatttctgtaatttattctcctactcccatttgaagccaccaagcctgtttaatattaaataagcaaatgcttcaagtactatggtgacttcttctgtgcctttgcaactaaagccttccaacagcagaggggagaaatttatatctgttatatacatagatgagtaatttgggaatataaaacaaatatccttcttagaaatatttaaacacagatgcttgattttgtctgatctttctctctcttttttttctctccaaacaactggttacccacacttgtacagtcatgtagagacaaaatgctcatttataattccagataccccatgtaattattgcctatgataatcaggtaatctttatgaaactattcctatacaattttcaaatctcagtttacaatcatgagtattttaccataatcttcataatgccctcttgaatatatttgcttaatatcattttgaatttagtgatatttaagttaacatattttatatgttttcatttcattagtaggcttttaaaaatttacttttttgtgagaatctgatttttgtgagactctgtgaacaaatatcctcactaattctttctaatggtataatgtgaatttgtcattgacaagtgttacaaaaaagacgcatagaaaataaaatattttaggtaatcctaagatagctcttccgcagccagggcaattgggctatgtgtctttgggttgattgttagctctgtcctaaatctctgaatttggagaaggaaaccctggatttgaattccagttcctcaacttactggctccatgttcattccttctttgtcaagccccctaacttccctaaacttcagtgccctcatcttaaatataatgacataatagtgtctctcataagattggtagaattacatgggataattcatcttgcatggtcaggggcacggtctcgggaaccagactgtgtgggtttgagctgctcagtcttggacaaaagattaaatatatctatgcctttgttttatcatctataaaatgggaataaccatagtaccttattcaaaggttgttgtgaagattaaaataaattaatcctgtaaaaatgcttaggtttctggcacatagtaagggcttagtaaaaactaggtatttttacctggtatgtgcaagcactgtatatatcctgatatactttctcatctataattctgtttctgtgcactagtttatatatttatttaatggaattatttttacagatttagtcagattttagaacacaaagcaagtggatacttagtagccataggggaatctgattttgatgtctcctacccaaagtttattcatatttaatattatatatacataagtcttattctttctcttcgtcctttttttttaaaggcaagatctgccttcatcttcggttttctttagtgcttagaagattgccttgctagtgataagtatttttgcttaataagtatatcttgactgtgaaatttgtcaccagttttgaaaggaactctggcagcaaatgaacaaacttaaatccttgtggccagggatcaaaggcaatctcaaaccgaattctataataaagagaagtttggagagagaaagggagtttagtgtaaactcaacttttgaaatccaaaggtatcaggctatcatgggaagagtgtgggattcagctttagccctggggtcacaaagtcatgggtatgctcttatataagtaacttaatcagatctctgtttcctcatctgtaatattaattcccttctcctatttcatagaaatgcttaaaatttttaacagaggtaatatatgggaaaatgctttgtaagctataaaattagtgtacaaatattagggtcactgatactctgtgacgcaattcaatgatttggtagaagactatatatatatgtgtgtgtgtatatatatattatatatatatatatatattatatatatatatatatatatatattatatatatatatggccaaccatatatctattagtagctctctctatatatgttttaaagccaggctggtcttaatcttgtctattgaattcattttgacaagaacagtgtaggatccattagtcctttacaatgaagaacatattaggtgagtcaatacttaattccaaaattttactttagaataagagggatgtctaacatcaattgattgaaggctggaggaaagagcgtggagagaaagaagtaacacactgctctgtgtttttgtgcctctgtctccagaataaaagtggacatgcccttcttcctccttacctctctctctctgtatccctttcagtacatatgtccaacactgccatacacagcctcgctgaaagtatcaggcaaagggagaaacagtgagcattcctacctccagccttgacaacaactatgaagtgtgttgctctaagctctgatcataagggaattagaagcactatgattttttaaaatcaaaatatgcctgtagctccaaaaaagaagaatttgactatagggtctcagctcactgctaggagaggtgtaactgattaaactctggtgcagaatgtatcaggatggaaggaatctgagaagtcaccaagttcaaatccttactttcagtccacagagtcatcctgctgcatttcctttttatgcctgcaaacaaaatgtttctggaactcatttattgtcagtgagtgctccctgggctctgaagcccagagatgttcctccataactcatcagaggcttgggtcatttctgagacaataagttactgctaggtcactgaacatacttggggtaggcagtggggaaggggattctgtgataagaaggtgatcatgtgttctctatttataggaaaatgaatcattctcagggtgatgagcatgtgtcattaaactgttttcctgatcatgaccttgcaccaagctgtttgccctctttgccctgttccctcaggctcagtggtcagggagggtgggccagctggccgagatgtgcagtccagtccagagttcaagaacagtttgaactgtgagactgagagccaagctgactaggtcagagtgagaagccattcctcagcatatgggagctgttagttagtgccctgaagctctctagttatttggggaaggaatgggagaaagcacttagatccctgctgggctcattacctttaattagcttgcttggtctggtggctactgcagagggggaaatctccaaaaactgcaaaaagattgtgcatgatggtgggggaagatactttaagaagggaagaagactctgttgagcttccacaaagaacaggttgttcatacctgaatgcacacagggaatgcacaaattttataaacaagaaggctgggtttgttttttttaagtttttctgtttttaaatttctgtttatttagcgggtacaagtgcagttttgttacatggatataactctggtctttcagtgtaaccatcactcaaatagtgtaccttgtacctattacgtaacttgtcattcctcaccctcctcccaccctcccatctttctgagtctccaatgtctattattccaccctctatgtccatgtgtactcattatttagttcttacttataagtaagaacatgcaatatttgactttctgtttctgagttatttcacttaagataatagccttcaggtccatccatgttgctgcaaaagacatgaattgattcttttgtatggctgagtagtattccatggtgtatatacgttacattttcttgattcaatcatccattgattgaatggtgtcctttgacttatcaaataaatggtgctaggaaaattggctagccatatgcagaacaatgaaactcgttcccctatctctcaccatatgcaaaaattcactcaagatgaattaaagatttaaatgtaatacctgacactataaaaatcctacaagaaaatttagaaaaaactcttctgggcattgcctagggaaggaattcattactaagaccccaaaagcaagcaaatgcaacaaaagcaaaaataggcaaatgggacttcattaaactaaaaggctttggcacagcaaaagatataatcaacaaagttaacactcaacatacaggatgggtgaaaatacttgcaaagtacacatccaatgaagggctgatatctagatatctagaacctatgaagctgtttttaagaacagaatgaggacatgagccaacacccaggattccagtggaaagtgaacagagcaggcacagttaatggaaaatgaacagagcaggtacagttaatggaaagtgaacagagcaggtacagttaacgtcatactttacctttttccatttgcacttcacgaagagatgagctttgatagttaacttctctctctttttctctctgttttcttcttgtgcaaactgggtgatgacattgactctcttcacaggaaagcactaagtgaggattaactaggtaatgagagcaaattggaagggtgatggagatgctccgcaaccttgctgatggatttctcccagcgagagaatctcttcaatgcatctttcatctgtgtcttacaggcagggtgtaccatcgttatctctgcattctgcttaagccatcccctccaaaccctgcctctaaggagctttggcctattccttgaaaggattcttcagttatcccaccaacaatcagaggcagcaggactcaatatccccctgtatggagaaaaactgagacaggagattgggctaagttgtcagtgattcacccccattcctgccctaaggaaaggatctttttctttccttttttttttttttttttttttgagacatggtctccttctgtcacctagactggagtgcagtggcatcatcatatctcactgcagcctctacctcccaggctcaggcagtcctcccaccttggcctcctgagtagctgggactacaggtacatgccaccatgcccagctaatttttgcattttttgtagagacagggtctcagcatgttccccaggctgggctcaagcgatctaccctgctcagcctcccaaagtgatgggattacaggtgtgagtcaccatggcaggccaaaagcatcttctcaaaaatctttcttccaaaatgtatattatacaaactttctggagaacaatttaggaaaataagtattcaaaattcttagaaaggtgcatgattcttgcccactgaattccactttcagcacatgaccattagtctttcatttcttcttctcttcttcacaccagagtgtattgccttcaacaaagaaactaaccacttttagacttgtaattaacctgtcccttcccctcatctgcccacctgactactgaaagtccccagagtctgcttcttagtgggacaccagccttctgcaaggcacttattctctggttatgaacctgtttaaggaaatctatatatttgcacagaaccatggaaatatagatgtgaacaggcttaagtgatcacaacccacattttttttttttttttgagatggagccttgctctgttgccaggctggagtgcagtggcgcaatctcggttcactgcaacctccacctcctgggttcaagcgattctcctgcctcagcctcccaagcagctaggactacaggcacgcaccaccatgcccagctaatttttgtgtttgtagtagagacagggtttcaccaagttgaccaggatggtctcgatctggtgacctcttgatctgcccacctcagccccccaaagtgctgagattactggcatgagccaccacgcccagccagcccacactttttatcagatgaggaactagagactctgagaagacaggtggcttatccaagagttcatacttattcaaggctacagaataaaccagaatctggggcctgtaactcccatatgggcccttctcgagttatggagacttaacggtgtgggacacaaaataggaagaagtagagtaaaactttataaagtaggaaaagaaataatgtttgtactatgtataatggcacttcaaaatccaccattaggagtgtctacagtttcctctgcataatttagaggctgaggccatgtacctcaattcagtccagttttctatccaagaggtgcaagctctaaaataaaggaaaggaatattctttatcagtcatcagcttaatctcaaaatattgtgtgctccataattgaccttcattagggcattatggacaggggcttactatatgctaagctatgtaaatacagatgctcctcagcttataatggggttgtctggataaatccattgtaagttgatccacacataaccctattaaaagtcaaagagcatactgaatgtgtattgcatttgcaccattctaaaatcaatgtgtcccttgtgtaaaatcagttgcatccgaaaagcctgaaacgtgtacatattctttgatctagccatcttattctaaaaatcaaaataaaatcaaaataaaatcaaaatataggtaagttgaactgtcataagttggggaccatgcgtactctgatagtcagtgttatgtatgaacttgaccaagccgcagggtcccagacatttgtccagccattaatcaggtgtgtctgtgggaatgtttctggatgagatgaacatttgaactggtagattgagaaaagcagattcgtctcccctatgtcagtggacctcatccaatcaagaccggaatagaacaaaaaggctgagtaagagggaactactcctgtctgactgctttgagctgggacatcaatcttctggccttcaagctcaaatgcaaatatcagctcttcttgagtcttgaggctactggttttcagactagaatttataccattggctctcctggttctcaggccttcagatttagactgaaactacactatcagcattcctgagtctccaaattgctgactgcagatcttatgactttccagtcattccattccttgtcataactctctttctctttctttctctctctctcctctctctctctctctctctctacatatatatatatatatatatatatatatacatatatatatatatatatatatgaacagatacatcctattggttctgtttctctggagaaccctgactaatatacagttatgtgtcacttaacaataggatatattccaaaaatgtgtcattaggcaatttcatgatttgtgaatatcatagaatattcttacacaaacctggatggtttgctgcacacctaacctgatgcacactgaggctttatgggatagcttgttgctcccagactagaaacctgtacagcatattactgtactgaatactggaggcaatttctaacacaatgacaagtatttgtgtctctaaacatagaaaaacacagtaaaaatatggtattataatcttatgggaccagttgtatatgtggtgtgtcagtaaccaaaatgtcattatgcagcatatgactgtatatatacatttacacttaatcctcacaaaaaccctctgaaataggtactattgttttgattatcaacctaactttaaaactgggaaattatacatagactggttaagttcctcgcccaaagctacacactgcatctggaaggagtctgaattcacccagataccgcgtgctccatctgtttgattcacattctcctaattgtgtcccaaaagcctgaaacatgtgcatattctttgatctagccatcttatcctaagaatttaccctaagtaataatcatggatgtattcaaatatatcgcaaaacatttataacagtaaaaatatctaaacaacttaaatgctaaacaataataggcgattggttaaatgttctatgatgtagttactcagtgaaatactaccttcattacaaaccatgccctcaaggactatttatttacttgggtaatcattcaagctatatagatgagagtaaaaggcctgttacaagcctgaggagagatggtaactaaatatactgtatgctcgatgagaccctgaaattacattttaccatgtttccttaggcttgtagcattccatttttacttctattctgaagcagaaaaaggagattagataaaaactaagaaaaccttaataaaggccgggcgcagtggctcacgcctgtaatctcagcgctgggattacacacatccctgtttttaaaagtgaaatctgccttctatagaacacattcccccacagaaatatactacagaaaacagacctaataaagtggagttttgttcaaatgcttccctcacaatgatgctttaatttgctgaggaacatatgattgatcctagttcacctgctgaacatgcataggcagtgtgcatctctagcacactgattaaaatgaatacccagaggctcaacatgatttcttattaatcagaacatacacaactttgtgaaagggaccttagagccattctctgccccagggtgaactgggacacaggtatagaaacctccaggactctgttggaagagtttttcttctaggttttttttttttttctgttataactgtcctttccaagattaaatgatgcctaggatatcacatcgttcagaagaggttgaaagagggagttatttataaatcctgaaggttctaggaggtttgggcttagaccactttggactcagagaaggctgtgaggtaaggcatgttctaatcttgttgatggaagtcctaatgtgtcttagaagatttctggtcatcactgtctttagggactcagagtcttcctctaagttagtttcaggaccctttgaagtattggcattgctggctcagtccactggctctttggccttcacctgtctgcattatggttatagctgagatgccaggaaaaacacaagatgagtctgttcagctcgaagctgactcaactggtttctaccacctcaattcaaactaggaatgagatatttttcttcctttgctttttagggcaattaatgttcccacatatctccctttttcttgccatttcttagcatcctaaacactaattttgcaaaataatgttgtaaatgctttgcatagtcactatcttatgttgcccttcctgttcacaagacagccgtccgtgtcagttgaagatttctatagatatgcatcatctctgatagataaaggcatgtttcagagactatcctggtgggagtattttacttttgaaaccaactaaatctggttttgctcctgtttgtggtactttatttctccctgtagcaggagagtagtgccaacgtgcctggaaaatcaagtttcaaacctctattgcattttaagccatgttttagaatcttagggtcaattaatattagagttcgacaaaatctctgctctcaaacaaaattatatacaaaagctcagtaagtaaaccaggtaaatgttaaggtgcttcggttgaatctaggtttaggagtccagagaatctaactcaaacctggcagctggaggatacccaagaaactccctgggcttagtagtgtacagtgcgaaaaacagcgatctcatccatgtccttcattttagggagatgatacctaaactttgtgggttttatttcaaagtcacatgttaattagtggcattgtgagggaagcatttgaacaaaactccactttattagatctattttctgtagtgtatttctgtgggggaatgtgttctatagaaggcaggtttcacttttaaaaacagggatgtgtataatcccagcactttgggaggccgaggcaggtggatcacctgaggtcaggagttcaagaacagcctggccaacatgatgaaaccccgtctctattaaaaatacaaaaattagccaggtgtggtggcacgtgcctgtagtcccagctacttgggaggctgaggcaggagaattgcttgaacccggaggtggaggtttcagagcaagactctgtctcaaaaaaaaaaaaaaagaaagaaagaaaaagaaaaaggatgtgaaaggaaagagtttgcaaaaaaaaaaaatgcggcaatcacaatacatttatgtctattcatattatttgaatttgtcattttcttcagtgattttttttccttgggttgttcttatttctacatcattatgtttattatatgaaggaagcagtcagcctcatgtttattctctggtagagaagaggaaaacagtaatttttgagcatgaatgcataagaccatacagtttatggaaatggctgtagcttctctaacctttcccctttcatacatacttgtttccatgtacacttcattccccctttttccccctttaactctctttgtatttgtatccctccttccctatgccctttttactcaattcattccctacatcacaacctgtggtttttgtatctgatcatagttttcaccctattgaaaatcatggctggccaagtacatgttaacaggaaaattctggacagtccctttgtacacaaaccttactgcttagtttcatctgtgcagattgctgtatactcagccctgcagcagagagaccacactgcagcctttagtaggaaaaggataggaatgacaatacactgcagacactttcgtgagtaagttgctaaagcgtcagtaaaacatcatggtgaggcctctgcaatcagcctgcttagatttaaatgacaattctgtcacttacaaatatataaccatttggatagttatgtttgcactttaagcctcatgttagttatctggaatagtatataatattacctacctttagtgtcatcataagaattaaatgatttttgtgatataaagtgttaagtgtggtgccagaccctggcaaagttggtaattgtccccttccttccttccccgctttcaccttccttcctccctccctccctcccttccttccttaattccttctgtccttccctcccttcctcctttcacctccttcccttccttccttctttccttctgtctctttcacatgccttctttctctcttcccttccttccttcccctcaccattctatgagggcataactgggagggttaatagaatggatatctaaagcagcgattctcgaatataggcttttaaccagcagaatcagcattacttgacccgaaaacttgttagaaatgcaaacacttaagtctcacccctaagctcctgattcagaaaatctagggttagggtttaactgtctgtgttttccttgtttttgtttgtttgtttgttttgtcgttgttgtttgttttttgtggttgttttgttttgtttttgagacagggtctggctgtgttgcccaggctagagttcagtggcacaatctcagctcactgcagcctcaacctcctgggctcaagcgatcctcctacaacagcctctgaagtcgttgggaccacaggtgcaccaccacgcttggctaatttttgtatttttggtagagacagggtttttccatgttgcccaggctggtcttgaactcctgagctcaagcaatcctcccaccttggcctcccaaagtgctgagatacaggcatgaagtcactgtgcttggcgttttaaccagcctgccagatgattctgaatttgaatatcctggtgagaggttttaaatcatgcaagtggctgtctgcctccagttaaggtaaaaagggaaaggcctcagcttacactgtggttgagccatatgacaggacatacaaacactattaatattactagagaagcaaccagcaccgttttgaatagctcagtctattgggggtgtgccttctactcaagatgtaaataaggataggaaaaatagcactagtatcaactgccatacaattatttagtcacccttgggtaactaaacagcataggtatgttgatcaaaatgcccttgagtaattgtcagtggaattttgaactctccccaattcaataagatactgctgcaggtattggtgaggtacagggagcatctaaatggactgtctttcattgtctttcttgagggttctaattctttggttttctggagaatattataggatagaatgtatatcagaagtgagacttgggagacctgtgtgacctcccaagcatgacaatattcacagatattcagatccatagaacacttcaggaaattgtctttatgttcaaagatctcatagaacatttagttggatacacttcccacacacatctctccatttgatatagagtcattatcttttcaaactttctttttggtcttttacagaagaacctgttaggatattctcaagatttgttctagtcacacgggggtggagggggagggggggtgtgttatagaagtagctctagatcatttagcttaagagttaaattttttgcaaaaatactttgtggtggatttctgatgccagtccgcataggacttttattattgtaatagtgttttgtctttcttttttaagattaggaaagtatattcaccataatatttgttgttaatcacttattttttatgcaccttttccaaagcaactatattgtccttatcttgaaaaatgaaaataatagcttccagataaatccttatgatagttttgctatcactagatagtggcagagggaaacagaggaaaaggagatctatgcattgtctttgaaagtcaagattattatactaaatgtttttgaagcattttgaaaatacagcgatatttacttataattctcaactatattacagttactggatctaaatgagaagtttgttcatctgtaaagtatttgaatgctaatggtattcttctagtctagtgcattcaattaaaatataacgtgtgttacatatgaagttaaaaatgtttagtaaccaaattaaaaaggtaaagagaaataagtgaagttaattttaataatatattatctttaacctcttttaataatatactctctttaactctttaatatatttaataatatattctcttttatatacatagaacattgtcatttcaacatgtaatcaatataaaaaatatcaattagatattttacattctttttttcacattaagtctttgaaatttagcacgtattttacacttacagtacatcttaatttggactagatgcatttcaggttcccaatagccatatgtgtctattggcgttcgtatcatatttatcatggcagttttaaatgtattaaaatgataagtctataaggtatcttcttaagtaaattctcccaagtataacagatatcagaggtaatatacacctacaaataattattgctaaagtaaaatttgtaaagctattgactgtcagtaaatatgtttaagaaacagtttttcgtattactctaagattgttcttaaaaccagcattgcagttcagtagacaagtgcagatatttgaaataagatgtttttatactacctatgtttaaatttcatgagcttcatccagcactggattttctggattctgagatatgctattcacatttcaacatttatgaaaacagaatacatcttacaattaatgtgttcatttaatgtaatcatacttcttgttttcctgaaactgagttggaaatcatcatggaaaataggttcttctcaacacaggaagagttctcagctattgtatagttgtgtttttgagaacatgcttcagcacttgagagatggatttcctagagtttttcttaaggatcaaaattaaaaggtggaaatatacaaacgctaaataatggaattaagcattggccttggataacagaaggtgaaggagataagagacaactttctgttccagctccactttaaccacaggggacataaatatatgggaccttgtagtatttaaccttgttaatatctccatactgttttgcagtaggcgttggaacagagcttcacatttttctggtggaggagccagtgatctctggatggtgaaaatattctctaaaacagactccacaactacaatgaccagtacaatgtgttttctatgccgctgtcctctgtcaaggggcatcacaagtggctggcctatattcatgtaaaggtagaactagaccccaatcaatgtgccctataaatacccaagtctttaaatacccttagataataaaggtaaaagatgcaagaaaaagaggactgggagagtgggccaagtttatagttctttcaaagtctatttgaattatttaaaaccattctttttttgttaatagattttaattctcatacatgtcacatgtttcttttgcagaattcaaaacatttttaaaaacacccatttcaataatattgcatgcaaggtaaacaagaggttagaataactagtacaacataacgcagcttgactagaatacctcgtcataacacaagtacatcttcttttacatttatgcaaagtgaaacattgtctgtctctctccatagtccagaaaaatctgtggggtaattgctcattgtcccttcacaccctgtttatattgcgcgtcttctattttaatagtcccaataaacagatggaaccacaaaaacacagccgggatggctcagttggtcaatggcatcagagaacttaaagtgcctgatgctgatgactcttccagaaggcaatcctcttatgagggtcagggtctagagagtccacgttgctgctcgtactctctgtgtttaattccagctaacatgacaaagtgcaagcgtatgacaaggactttcagtgtgaccatcagctggaagaagccaagtgcgtacagctcccggtggggtggcacatgctcctcttgtgacttaatggtggcttgtggctccacttcccttgggggttgtttttgttgttcttctctcaggaccacatttattttgatgttttaaaagagaaagaaaagttccaaaaacttcctttctcgtatttcctctttgagatccagcaaaatttctacaactggccttttccagatggcttgcccagaattgctgagagtttgaggcacctcaagctctgggctcaacatcgaaggttctttaaatgtgccttttatcctttagtttctgtcacttgatgatgggtgaccaccctcatctctctctctctctctctcttttttttttttcctactaaacatgagattactggaaatatttcatgattggatacatgctattggttaatccatttaaccaaactcccatcaatggatgtggagtgtttacaacatttttgctctcataacagtgcttgacaatgtagggatttgtcaggttttaatccaaatagggctttatgatacttgccattatactatcagatactttttcccactgatatggtttggctgtatgtctccacccaaatctcaccttgagttgtagtcctcataatccccatgtgtcaagggcgggaccaggttgaggtaattgaatcatgggagcagttttccctcatgctgttcctatgatagtgagtgagttctcaggagatctgatggttttataaggggcttcccccttcacttggcactcactctgtcctgccccttgtgaagagggtgcctgcttctcctttgccttctgccatgattgcaagtttcctaaggcctccccagcagtgtgaaactgtgagtcaattaaacctcttttctttataaattacccagtctcaggtatttcttcatagcagtgtgagaacagactaatacactcatcttttgaatacattatgtgaagtacaacaattttttccaaaccaaaccagacctggctaaatcctttactatagaccccaagattgagagagagggaaaaaggaattgatctgaatcaaatttgctgttatcaagaagtagggtagggaagggaccaatatgagatgtacgaaaattggctcccaaagtacagaaaaataaagatttgacttgcctactcctggcataccatttgtaggttctggccaacatctgcccttctctgagcctggagcttctctctttcaaatgggagataattgctgggcagctagagctcacaggcacgccgcatgatgagtgaggtcatgttaataaagccctgggaaagaaaagcaatgtgaaacagcagggctattaccgttccaagacgattttatacaagtgaagcttaagttcagtgtgatgattaacaagctattagagccaagttattgattcctctatctttagagtagctaatgcagtgtgcaccaataggccacagaccccaagctttccttcttcctgtgctcctgttctttgtaatgatgctttccttaggaaaatgaaaatcacttcgcatacacagtgcaacatctttaaggcaggtgccagcagagaggaaaaacacctaagctgattttgtgtgtttttattattttttctgataataaagattaatgcagatacatgaaaaaaacaaaacataaaaagtaggaacagaaagtcaaatactgcatcttctcacttataaataggagctaaataatgtgtacagacaggcataacagaacggaacaatagacactggagacttggaagggtgggtgagtgagcagggttgagggatgaaaaattaccttagaggtacagtgtacattatgtggatgatgatttcactaaaaccccagacctcatcactatgcaatatatccacataacagaactgcacttatacccataaacttatatttaagaaaagaaatagaaaaaagataatttttttaaagtagaaagagggaaaaaagtaaagcatcatcccaatttctttcaccctgaagcagctagttttgctaatatgatcatatacctatccacacatatgtatatgatcatattaaacatattagtttataacttgttctttgttccttttctaacatactcctcacaaaataatatcattgatagtttcccatttcaattaaaacagatatcaatataatttatcagcaaaatattttatggatgtgtgtacagttttggttaatccatttaaccaaaatcctcttgatgaacacagagtatttacaacatttttgctctcataacaatgctctgatgaacctcatgcattcatctttgagcttttgaccaattttccttctgtggtaaattcctgaaagtagaattgttgggacaaaagatttagagattttgtatctttaaacatattaccagtttgccaacccaaagggtcatatgagattactttctgcctacagtgtagtaaagtgccagcttctcccaacaaccttgccaacgttgggtattgtcaattttttggctctttgccaagctgataggagaatggaatgtctaatggtttttgaattacattctgactgtgctgcatcagactgtaactgaatgcagttgtgatgtatcaggggacctggtttaactcagcacactgtttgaatctgtgtaataactaactatgatataatcaggctttcttgcagttttgaaaaagaagccaaactttcacatggtttaaattactctctcatttacactctccatgtgtgagatcacctgggaagccctttggagatgcccccagtgacccagtacaagttgtcaactgcactccccatgaaagagagattgttctggtccaaaccctatgctctagaggagcatcttggaaacagcactgccctataattgatattgctccattgggtggcctgtggtattcaattcactggaaagtatcaatccctttgccttcagcaataatattttcacagttttgatgtgttttaaaggttattgtctccaggacaggtaattgaggaggcctcacacttcatcagaggccatttcatctttattacacagccacacacaaggcagcattttctcctttcactgatggattatttcaagatttataaggtctggtctacatgaaagcaaacacatgtttgggtacacagtcaaataattcaaagatatagggtcagcaggatcctaatattaaagtcaggacttccagcctgggcaacaaagtgaaatcttgtctctacaaaaaatacaaaaaattagccgggcatggtggctctcgccagtggtcccagctacccgagaagctaaggtgggaggattgcttgagccccaggaagtggaggctgcagtgagccatgttcatgccagtgcactccagtctgggccacaaagcaagaccttgtctcaaaaaatgataataataaataataaaagtcacaactttttcctcttctacctgtgccagagacccactacctaacccacatacacacagacacacacaaacacaccatacacttattcctttcttaaaatgtggctttcaaatatttgctttgcatgcagttttctctgaagatatgaccagtttcaagattatctactctaagttttctgactggttgtcagtcagtcagtttggaaccctgccataacatattttcctcaaattccttgcagatactggaataataatgaatgggaatgttattttgagccgatatttggaaagtccttatttggaattctacaagtttatgtctcctgcccagttcctaagccctctttctagataaccatccagaagataatcatccagcagctatccgggtacattcggctgacttggttagttgggtctaagcagtatatccatgagttctaactcgggtttctcaaactctttttcctttgggtttctcagactcttctctcaaactcaaactgccttctccagtccattgctaaagcttgtatgacctttgctttccctccatttcttgacttgtggcatccactagtcctacattgtaggactagtgtgagcaggtcactcagcctgaaagcactcaccctgggcctctagagctaagttgcctcaacacacttcactatggcttctcagagcacactcaccttgaatgtttagaaaaggtaatctttttggggttcaatgagatcaaaagcacggataccaattttgggatcaggaatcaggaaaatctgggaaatgaagaacgaaatgaggccttaccattttgatacaaagttcatattcaagtgagtcaggagatctggtttaagttccagatctgcctcttactagttttagaatcttgggcaattctaggctggacgtggtggctcacacccataatcccagcaatttgggaggccaaggcaggtgaatgcttgagcccagaagttcaagacatgccttggcaacataggaaggccccatttctacaaaaataaaaattagccaggcatggtggtgcattcctgtaatcccagcaatatggaaggtgggaagatcacttgagtccaagaggtcaaggctgcggtgagctatgatctgccactgcactccagcctgggtgagagtgagatcctctgttaaaacaaaacagaacaaaacaaacaacaaacaaacaaacaaaaaaacaaaaaaaattggagggaatttagttcatatatttgagtctttgtttcctcatctagaagatgtagtaaagataaatgaggtcatatatgattgtccctggcataatattttggtacttattgaaaagcagctattgttttaagtcctttgcatatacatttctatgatttactatatatcagtagcatttctccaacccatcttggctaggcaagcaccactgaatatgaaggaggccaaatagaatgatactatccaagctgcaaagaaacaaacaaaagaaaacatctaaatgcatgcctctttggaatggcatttgcatccgttgccaatatccatagaacaaatgccttcaggcaggagaagttgggataatgtcaatgtttttaatagctgtagtagagtcctatttagaaagcagtaattatctctccatattgattttttacatcccctcaataaatccagaagaaatgtgaagaccatctgtaagtgtgatttttaccaggatcagactctaatttgcaatggctatgtgtctgtttgatttagatcaggggttagcaaactgcagcccacaagccaaaactacctcccccatctatttttataaataaagttttattggaacacacccatcacacccatttctttatatctgtggctgctttcatgctaccatggttgttttatttaattgtaacagagatctaagagatctagagcccatattgcccacagagctgaaaacatatgtacatctaaccctttgcaggaaaaaacttgttaaatcatgattgagattatagtagtattatttctgattgactaggtagtaattggtcccagcatgtaaagtttctaatattaaagtcacacgatagaggagctagaggcttaagaaaagtatacatgaatttatttatttggaataggaagggaaacatccctggtatcatcatgatggcatatagaggcagggctgagagctagaatacagaatacgtcctttgctagaaacagtttctcgggctgggttagagtgggtagaaactatggatcatcctgccgcaggtccaagtaaacaggatttggcgctctacataatggctataaagaaacataaaggtgatttctccaagtgttatgctaggtgagaaatatttaataagtaagagcaatcagaattggtcccatattgagaaagtctgttttggagcccagactaaatagactgtgcagtgagaaatgaaaggtcaatttaggtaacttcatttagggcaaaatcatgacttaggaaatcatgactagataaatatccagtgaagagcagggagagaagattcatcaatggccgtaggttgctgtgaactacagaactgaaacatcaatgtatgaataaagtgctgtattgatggacagatgtgtgcatttttatgtatatgccataaaaaatctgaatcaatttctatttgaaatagagaaaagctagttcagatgttagaaacttttctgacgcaaaatattgtgtaattcataaacaattccttgtgttttagtttacagtatgtccagaatataggacttgcctactgtaatgtataaaacaaaagaacttcaggttgatttatttgttaagtagtagacattctcctaggatgtttatgtttgtgaagatgataaatggaagaatacatccacagaaaatgtagacacaggcccttctctcccagtctcaacaccacaccctacacacacacaatgccttccttctaaccttgtctatactgtctctgcaacacacaaagcatatgcccaggataagcttctctttcaaccacctatcaggctttcaacatgtggtttgaaaagatagtgacattgctatgctctgacatacaccgtaatgtcagtacagcagaagcaagtggaagattctacttttccgataaagatcagttgctgtttcctgtcttgaagacgaaagttgagcaaaagcaaaggtcatctgtgtttatattaacaatgtaagagttatactacattttcgcaacaacatcaggtcattatttatccacttgtcctttttttttttatcattcctttgaactgcctgcatttgcttatcgtgatatttctcagtctgtaaacagcccgagtagctgttctatttctctaaatagagtcttaggtcattttattatccagaattgtaagtcatcagaatgcacccatctgttgtccttccacatctgggctaactttaactctttaagcccatagaaaaagtagaaaagccattgtgatatgagtttgatacttttttcctaccatactgctttccagcatatggttttccctgaaaaatcacaaggaaatatttacaaatatcttatttttctttggacatggcattaaacgtggtagatcctccatctccacttggctctttctgattttctgttaccctaattatccttcctgcgatcacagctgctcagagcctcttcttaccaatttaaaaaacctctaaagatgtgacggctgcctttccagtggccaacaagcagatttccatagcagaggagctgcgactggggcagagagccaaagacagcttgtgccaacagccttgtcaatatgccaatcatcttgttacagtttattacatgcgtgacttgattttcttgcatgtgcgttttagaggtaacaacatattggtaaacctgttttcaatccttttgattaccttcaatttgatagctccttcagtaatgaagaaaaaaatgggctattgtgtttgaattacatttatcaaatgattctaagattgttctaacgtgtgcgacaggataagctctcttttagtcaccaattggagaaatatgctcagtgtcaaggaaatggagaaatgcctcattatttatgttgactaatgtataaatacaatatgaacaggggcggtttcaaccctgcaaacgttttcttccaagttgctctgtattttagctagactagactagattgttcagtggtcacaaactaccccaaaatcttaacagtttacaacaacggaagtttattttctaaatatataacatccactgagtgttggccagcgttgactgggggttgttctccacatcacgtccctaagggaccaacagtgttggaggagtctctcttctcatattgatgttcaccatggcaaaggcaatgatcacagtgaaccacatgctacattttaagcttctacctggacaccacacaagtcacttccactcccatttcggtggtaaagcaagtcaattcaagtctgacttcagcatctttgggaaatataattccaccccaggaggggaagcagatatgggtgaaatgtaataaaattcacctctccataaagtcctagtagcattgttttatttgagtgaattctttttttttttttcttccttacagatcctctttaaaacatcagcctggaaacagtatctgtagaaatcagttttgttagttctaaagcagggcttcattgttgggatgtgttgtctgccttcgttagcagatttcaatcatagccctaaatggaagacacattttagggctgttgctgctatagaactccaggtctttctgcttaacggtttcacacttacgtgtgaagggaggacacccttggccaaaagaaccaaggctgctcagttagctgctggttgtcctccagcaaattcctagaactaaatacctggtgctgaggtgtcacgactcagcaagtcctagaacctgtgcttatgacagcactctgataattcccggttattgcatcactccctgatggaaacccagcttttatttcagcaaaagtaatggattgttccagacccctgacctcccttgaagatgtctttttgttggatctggccctgtatattttccagttggttcaagacctagagaaatttctacagactctctcataccaggtaggtttttgtttgtttgtttgtttgttttgcttttgggataggacctagtcatattcagtccacattggaaagcataaattagtgtaacatacataagcttgttcattccactccatgtgttaggtttttgttagtgaacactgactgcaaaaataccaaggtatagccttatgcaagccaacatagtcacgttggacattagtgatctgagggtggaagtgaaatgaagtacggttttttttttccaagtcaactaaacgaacaggctgtatgttttacaatatgaattgggttgtgatatacaaagtgtttatccaaagttaccctcctctttgttttttagaatgacaagacccaaatgggagaattaggccagaagcaacaatgccctcaggcttagtgaaattgaccaaagtttgaaggtaagtgttttcagaccctggtttcctaggaccaagtcttggcctcatcaaacataatcacagtctccttttaccactttggcccaaacactatgaagccttttgcccactggctcagcttctcttgccatatactgattattaatgccagtaaaatacctaggcaccttggcagtaacttacgcaaatatgtatatttctaattacagggaaattgttagaacatgacttggattagagatacacagctaataattcaagaagaaataatgctttgttttcagtagaggaaaataaaagcttcatttgaataatttttcctcctttctctccctttttgttttgatacttacgcatgggcaataccgtaaactggcaataaaagaagttatcgcaaacagtgtggccatttctcctcagacactggacatcctacatctgttatatggtttaccatccatccacttccttgctatagctccaggtccacaattctttgtcatgtcattgctcttgacctataccatgactgataaccatgtacatttttaagaaaaaaatgtaaattaattaaaataatttaaaaacacatatccatatggtgtttgtgcatatattttgctttttctaatcttatctttgtagttcaaaaaggttaaacctgaatgtgatatgtgtgtgtatggaaactgaatgcactataggttcaaataggcaaggaagttgcttagtaacatcctgttcttgactgtgctatcataatttgcattttccaataaagtgtgtttccagccttaggacagtgctactattattgctggtggattttgtaatgtaagcttgactcattcagtgtcaagatcacctaaggccaaattcccattccacacgaattctctttcaagggatgtcctacccttcaagatgcccttaagaattctggattccttaaatatagaactatttatgcttactcataaaacagggaatgttataatatttctctgcttcactgtgtccaaggaagtagagaaatctggtaccatatttatgagcagcaataaaccatgtgttttgctttttcctaaaacaagcctggcaaactgtttaagaacacatgtgcagagcttgggcacagggtgagagtttggtggcacggagtgaggctagaggtgggcgtgtggagagtctgatatcctgatatcaaagcaattccattcagacttaggcctgagctgctcccagtcatccaagtcatttttactaatatctgacaacttgcaaatattgtgttacgttcaacactgaaaatgaggactgtgcatttccttttgtctaaatgatgattaaatggtgaagcagctacagaagtattgactaacgacagcatccatttactagaaaatatgtcatttgctactgcaaacatttatggtctgattatacctcatgttacactgcaatggtttgggttttttttttttttttgtatttttggtacatcagaaacacttttcccaatgtttgttagtttaagcattgttcaacatttatttattaagcattgactttataaaataggtaccaggaatatgaaaatgagtaagatatgttccctgacatccagtagctcatagtctagagatgtcaccataataataactagcatttattggacaccacctgtgtctcctgaagcctgttacctcatttaattttgacaaaaccttatgaagtgaatattatcacacaaacacacacatttagagaatgaatgtgaggctcagagaagttaaacacattgcccatgatcacagaaccagttagtggcagagttgggatttaagcccagatctttctgattctagagcgtatgttctatctatgaagctcttaccgattttattttatatcaagtgaactgtgtaatacataaagtcactcaggaaacagtactggatggggattatgatactaggcagtgcttactctagcaaataggtatcagagccctggcataggtcctcacttttgctaggattctgtcctactccacccttgctgataaacgggaagccacacgtcctggtccagcacttattctcaggcctcccagggacactcactctccatcacgtagtctcttccctaagtagtctgtgtttccctctgccttgcgggtaacttcatctgtgtgtaccaaacctgtcacccctcttagtagtcctcaaaagacaagacttcaagggagagttaatattctcagagttcatcagaaatacctgtttccaaggtcaagacccaccttagaaaggaggtcttcatataccctgtctgtgcttattttgtgttttcacaacacaaaatattttaacgatgatttaatttagttgtgtattgatagtctctgtcaatctctcagggttttttttttctgagggaaaaaattacattttgtaattttttaatttagaaacaacagcaataacaacttgagtcggtgacttctgaaccatttttgttctgattatcactgtaaacctaaatgtgtgaacactatcagtagggataatatttaccctatgggactgttaagcaatttaagatgagataagaaatgtcacagggaaaaggtgttactccacacatggtagtcgttattatttattgggttgaagtgttggcctcccaaagggcaatggtgatttaatagaatataagcaactaaatcccaggttaaagcagtgaattcctaattgtagaattttcctgttaaactatcaggtgggaaaggcctgtcaagatgtatatggaaggagtgagatccttgaaataattaatacacctggtataactcccatcattaggtaaacctgggctcatccctactagacagtaatagaaaattagaggataaaaggatagtcacaaaaataaatagaatatattgaaagctaactatgtactaaacagtgttctaggcatattttacatttattaattcatttaaacctctcaactccctataaagtagacattactaattatctcccttttacaaaaaaagaaatctgaacctaagagagtttaaaaaatttgcccaagaccacataatcagaaggaagattttgaatctgatttttcctcacagcaaagtccatgcattttccactttatcacaccggtttttgtttttgtttttgtattattatttttgagacagagtctcattctgtcacccaggctggagttcagtggctctcagctcactgcaacctccgcctcccaggttcaagcgattcttgtttctcaggctccagagtagctgggactacaggtgtgcacttgtattttttagtagagacagggtttccaccatgttgcccaggctggtctcgaactccttttactcaagcaatcctcctgcctcccaaagggctgggattacaggtgtgagccaccgcacccagccaatcacactgtatttaatatcacaacgaagtgcagtctgcccttctcaggatgatcttagatctatttttcagcaagtcgcattcgggtggagcaaaagcttttaaatggtggtcaattacacaatgattaaatttagtttaccattataggtcaaagggaagtgggaagagtttgatgactgtgtatttgtcatgtttctagttatagtgtacaactctgcctgtttatctgagtgagtgccaagaggtgaggtcagggcaggggctcttgcacatggcacatactatctgccccacagctattttgacttggacagtcattgtgctgggtggtaaaaattccagtgggctgggtaggacatactggggccctgtttcctctcatctgtgtttgagaactaggcagcattgcatcaaatggaaggaacaagtgatgagacatcaggaaaatatcagaatgaaagagaaatgcaaggctctaaaggaagttccaactcacttcgacaccctccagttagcaaagaggtgacagaatcccaaaagggcaggggagagattatggatagcaggctcctggaggaaaaactaggtatgtccagtagcagatctgtggaaactattagaaaccgagctaattgtggacttcttagcatgcctcaggaaatgggaaggaacttttcccttttgggcttgtattttttccaattttccttgttcgggaaataattaattctttaagcaatgtaacctcctgctgtgatttctcaattccacaaaagagaataattatagattaataatggaccaaaatagaaaaagctaaatgtgtgtagcagataagtaggaaatgttctgtcttgtaaagggtattgtttcggtgcccggcaacacagaaacaattctcatctatgcagctctaaatggatgttagaattcacccctctttcctactggtataaaattttcagtctcagtaggactaacgctttgacacatcctaaacctcaccaggagtaggaaatatttctcatagcataaatattttttcttccttgaactgaaaggtttgtggccttccccatgcatgataactgggcagttttcagaatatacctcacagtaaaacttagacttcacacctgtaatcccagtactttgggaggccttggtgggcggatcctgaggtcaggagatcaagactatcctggccaacatggtgaaaccccatctctactaaaaatacaaaaattagctgggcgtggtggcacgtgcctgtaatcccagctacttgggaggctaaggcaggagaatcacttgaaccagggagtcagagtttgcagtgagccaagatcacaccactgcaccccagcctggcgacagaatgagactccatctcaaaataaaataaaataaaataaaataaaataaaaaacttagacttcaagttttaactattgaaaaacttccatgaattgggtacagtactgagctaaacgttgtatatatgttatttattcaggaaatattttcaggtactatgctgagtgctaaaagcattgttctgccttttaatactaacaatgcctgtgaaaaatatgtaggattatccagactttataaatttaaaacattaggattcagaaaagtaatatgcacatgctcctatactttacatgtgacagactggaatcaaatggtttaggatgccccgaataactgaactcttaatgccccagaagcccagatcgggacccaccactgggagttacagccctctggagccagcttcagaggtgcacaggtttattctcttccctattcaccagtgaaagaagcccagagcctccattccaggcactctgtgcttcccaaagtaacaattacttaatttgacaagataatttaaagagattgccaaaataacttacaggagattgccagtataatcagccctcccatatctggggattctacatttccagattcaaccagttgaagagagaaaatatttgaaaaaaaaaatttaaaataatacaaataaaaacaatacaacatagtatttatatcatattgggtattgtaagtaatgtagagaccatgtaaagtatatggaaggatgtgcataggttatatgcaaatatgctattttatgtcagggagttgagcatctgcagattttgatatggaggcaggggtcctggaaccaacatcccatggatacctgagggacaaatgtaatcaccatgttttcccaggtggatttttaacagtggccttctggagacactatgcctatggtttagtctaattgttaaaaattgggataggtgaagaaagatggcagataggcacaatgggaggcagatatttccataaatgccttttaaatcagatcctttctagattcacttttggctctggatctggaagctatcatcatggcaaccccagagtcccattggtttgcctattggttaggtgggccaaggtgtccacatatcacaaaagagttctcaaaaaatttcttcccaataacgagggagatttatatttaagagcacctttagccaaactgaaggaagggaaagttcacaaatatggtaatagctcaagtcaatgaattagaggctttgtgtagggtaattgttgagacctccccagttgactgaccaaaacaattctttgttggctagcagagttagagaatagaattttgcataatccaagtatttcatataggtcccttctgctgttactggagcactagtgagctattgtatttgtggtcataatattagctgcataggtagttctataaatgtgtctggttaataatccacaaacgtcagtgttttacatttgtaagtaaagaagtctctgtccacagcaaaaacgttaccaggcaatattttttagcattaaaaatataaaataaaatcaagttacttcaaagttctaaagaactagaagtcaataaaattcataaatatttatttttcaataattctggatgtatcttaggatcctaatataggatgtacatcctaatatagttatgtttacctgtcatttattttaattgatatatgccagtacttctatagtaagattttattggtaaaatgttttttattcttcaaaatgcagattcctttcatagggtatattcatctaccattttccattctttgaaatctgaaataagtcctaaccttatacattcaccaggagtgtgtattaatcacttctcacactgctgataaagacatacctgagactgggtaatttataaagaaaaagaggtttaatgaactcacagttccacatggctgggaagacctcacaagcatggtggaaagtgacaggcacatcttacatggcagcaggcaagagagaatgagagcaaagcaaaagggaaaacaccttataaagccatcagatctagtgagacttattcactaccacgagtattgtgtgagggaaaccacccccatgattcaactgtcttccaccaggtccctcctacaacacatgggaattatgggagctacaattcaagatgagattcagatgggaacacagccaaaccatatcagagtgtatactttcattttattcctcaatcttcattccttaagttttcaacaaataatttgcttttgaaaggattaggagcttaagttggctttatagttatccagtaaccttttgatttctccaaccaatgatttgtaaaggaatcttcagattcagatttatcctttcctacttcatcttcaattgctaaattaagcatgagtcccatcactgagataacagtctttcttggacagagttatgccaggtctttttctatgtaaagcagtcatctattaggctgtcgttggtctgtcaagatgaaactgtgtgcattggatccatgtgaatgaacatagaacattatacaaatattgtatgtttctattctttgcttgaagcttctggttacttagatcttatagtgcttcatagtataaaaaatggttaaaatacttaaaagttttaaagataaagatgtcagtgtcacagtgcataactgggttttacatggtcaagtatacacacatacacacacacacacacacacacaatttaaaaaatctctgatgcactatgccatactcagcaccaatccccattacaactctcccaatgtttcctggccaggcaggtcaccaagatgtttgggactgtttatgcctttgcacctactcatcataatattgtgtggggatcaatgggagagatatttggcccatttttaagccatatcaggggatcttccacttcctaaactcacttagacttggaatttaagtctagactattttgtttttaaccttgctaacacctacctacctacctacctattcattgtccatagcctaggtagtcttgaaaaaccctccattcccgcagcttcccccaatgcctcctctgaactcagtgtcactcctgtgtgcctcctttagtgttttttttgtttgtttgtttttgtttgtttgtttgtttttgtcattgcactcaccaccttatattgtaaaagtctattactaaggaagtattcctccctcctttatgtgcagaattccttgacagaaaggataggtcatgtttacctctgtcttgcctccaatgcgcagcatgaagcctggctctatgatcagctctaaagaaatgcttgttgatgggcaaataaactcgagaatctcacaccagagccagaccggaagtttccttcatttcatgactggttttcacaaaaacaagcattagggagagtggaaggaagagcttgcaaaataccttactactgcattatgaatgtggagttgtaattttgaggttcttatccatgaagatggtccttaaaattcagaattttaattaccaacataacaccatcctttcttactagtatcattattttatactatgttttcagtaggacatatctgatggaaatacatttcttttgatattatttattataactggtgagctacattccacccaatagtaaatgcctctcagcaaaaagatagatacttttgatagttaatatattcagatattatgttgtttgtggaaaccataacttaataaattttaaaacagtgtcttctttaaaagtaattttttattaaactttgtattttgaggtaattgtagattcacatgcagctataagaaataatgcaaacaatactttttacccagtttcctccaatggtgacatcttgaaaactatcgcacaatagcacaactttgatattgacactgatacaatcaagatacagaacattttcatccaggcatcccctgtgcttagcccttttgtagctacgtctacttcctttgcccaccctcaccttaaaaccctggcaataattaacattttgtcatttcaagcatgttatataaatggaaccatagagtatataactttcaggtattggttttttccaatcagcataattctttggagattctttacttagcatacttctctggagatttatctaggtgcttgtgtactagtagttcattctttgttatcgctgcatagtatttcatgctagggatgttgagccatttacccattgaaagatacttgggttgtttctagtttggggagattataaataaagctgctataaatactcatacacagatttttgtgtaaacatacattttcatttctctgagataaatgcctaggaatgagtgtgatttctagatctgatagtaattgcatgtttagtgtttttaagaaaccaacaaaatattttccaaaattagatgtgccattttatattcctaccagcaatgtgacagcaattgtttttctgtatcttcaccagcatttggtggtgttactttttttattttagccattatgatcagtgcatagtgatagctcattttggttttactttgcatttctttagtggctaatgatgttgaacatcttttcataggcttatttgcatctgtatatcttctttagtgaaatgcttctctgttcctgttgcctattttctaattagattgttttttgactgttgagttttaagagttctgtatatattcttgatagcagtcctttgtcggatatgtgatttacaaatattttctcccagtccatagcttgtcttttttattctctttactgtttttttccacaaggcaagagcttttaattttgataaaaataactttttatacttaattggcaaccaaatacctaaatgtcttttgatagaaaaacttgtcctagataatgtaaaatcattttacatattcacagatccatctccactaatgtcatataagtttaaaaatcacaaagtaatttgaacagattcctaaattataaattagttaacagttattttttgctctaatctttagttgtacatttacttcaaataaacatttgttaaaaacgtactctgtactgaggaatgaggatacaaaactcataatttgtcatttctttgcttcagggacttacattttactggattacatctaaatttttatttggcagttttattccaggaagatcatgacagtcttgttttctaaatcttaactgccttttgatgaaaaagaaagataaggctttaatttctctagtgaaacctgaagaagtaaaataaaataacttgtatgtcccttcacaagccacagtcagaacactgtcacaatctcgacctttgctccccaaaccctattttgcaaaccagatgctatttctttggacattacaggctattttcaaaatacatcagaacttaacaaaacatcatattagctaaatagcactataagaaactgcttataatattaaaattatgtcttgagtttataattatataaaaattgaatctaccctagagcaaaaattataattaactactaaaaaatcgaataagtgatttttttttttttttttgaggcagggtctcactctatggcccaggctggagtacagtggtgtgatcatggcttactgcagccttgatcttctgggctcaagcaatcctcatcctcccacctcaacccctccagtagctgagaccacaggtgcaccccaccacacctggtatattagtttattttcacattgctgtaaagaactacctgagcatgtgtaatttattaggaaagcaggttaaattgattcagagttcctcctggctggggaggcctcaggaaacttacaatcatggcggaagacaaacaggatgcaaaacacctcttacaaggtggcaggagagagagagagtgagaggggaactgtcacacacttttaaaccatcagatctcgagataactcactgtcatgataatagcaagggggaagtctgcccccatcattcaatcatctcccaccaggcacctcccctgacatgtggggactacaattctagatgaggtttggttgtggacacagagtcaaaccatagcacccggctaattttcttttcttttctttttggtagatatggagtgtcactatgttttgtttccctagctggtcttgaactcctgggctcaagtgatctgcccacctcggcctcccaaaatgctgggattacaggtgtgagccagtacacccagccaagaagtgatttgtataatggcaggattatgaatgattatttctgtgtctttaatttgatcatatttttaaaacagtcattatttttggtcatcatgctatatactacagagagcagtttttaatttgtgaacgtgtaagtcaacttgatttagctgaacatagcagagtcatcaatcaaactgattgatgactaagggtccgcagggtaacacatcatcatagttgtttccatggtgatgaattatgatgtcacaaactcatcaagactgtgactcagtgaaccatctagacagaggatgaaatgcagtagttcaccaacatgtatgccatctttgtattatatggtattattaattaaaacgaagggctgagtatttctttcattgagattacatgaagatattacgtatattcagacttgcctgaacacggctatgctggttttaaattgaaggttttcacaaagcaaaaaattgagaaacagaatttgacatagaattgtgtatttattagaaaagatcttttcttctcatattctgaaaagcacactcattaattacagttaaattcaggcaaatttggcaaattttcgtcagtatacttattcttttgttagttaatagctttgcttttcagttttagatattggtattaaatatataaagagaaaagaccttagtgttctcatgctcagagattaagagaatagttataggtttgaaattaggcactttccctgatagtttttgttggtacatgttttaggttatgtttctatgaacaaccagatgcaaacgtcctggcattcatcctgcctgcttgctgtttgtaccatctccgtggtagcaaccatccaagctgctggaagcacagactgagctctatgagtcaattattttatatacctgggaacgtgctagccttcctgtcactctttgatgtcactatgtagacagtttgcagcctaggcaacatggtaagaccctgtctccaaaacttccaaaaattagccaccaggtgtggtggtgcatgcctgtagtcctagctactctgaaggttgaggcaaaaggaaccctcaaccccaggagtttgaggctgcagtgagctatgatcgcaccactgcactccagtctgggagacatagtgagatgctgtctttaaaataataataataattttaaaaattaaaaaatatctagacaatttctctgctttcaagactcttcaaagatctcaaagagaagctttactctggagtctcaacagaggccattcaaaaactcaacctggtttttcaacaataaattagaaatgtaatgctaacagtaggtgccaaggccgaacatcagggaaaagacattagtgaccttgagttctagactagattttaccagtttctgaccttcaactctggtactcgattttctcataaatgtgagaaaatatcttaaccgtatcacagaattgatgtgagaattcaaaataaagcatatttaaagctcctaggttagtgcttcatttatgaaggtcagtgcttcataaatgatagttatttttttccattcaaaatagagataaaaaagactttatctcactaatgtgtcatgcaaataaggattaatcctgttttctattcctgaagcatacagaatgtgatttctttctccatcatttccatctgactatcatctgggagaacacacagctgctccacatctggtgcaacacaggcagatgtagctgtccagagggagaagagtgtttgcttttctccacctaaacactgaccctcttctgcttagattcaaagactgtcttccttctgcaggtttacctgagcctggactcaaagaattaccttcattatgagctaaaggaagtcaggcccattcttcttctgcctggcccctctggctctttggcacttcccacatcctcctcatttggaaaggcttcatgactttctggttcacaaagcagctctgttgttgcttatttccactacagggaaaaagtgaaacacttcactcagggcgcagaacaatggaagtccctggaaggaaaggcttgcaagagaaaaccaagtggcttctgagatattcgaaagtccagttgttttccctttttaaaaattttcagatgctctttgatgccatttcataaagcctgtgattgggccaaaagtcttagttcaccatgtaccacaaatagtgtactctatatagcatatgcttaactaagaaaaaataaagatttagaaatagatgtattgaggacatgccattaaaagcagcttccattgaatcaactgtttttcagagtactgtcaagattaccttaaactagtctaatcaaggtaggtggtggattccaaacttgggaaaaagtgagtctttgtattctgtgaagtttaataactacccaaggaagaagtgttggatacaacaactatgagtatcttagaaagtatgtcttttttttttttctgagtcagggtcttgctctatcacccaggctggagtgcagtgatgtgattataactcattgcattgcaatcttgaccccctgggctcaagccatccttccatcttagcctcccaagtagctaggactacaagtggatgccaccatgcccagctaatttttttcttaatttcatttttgtagagataggatttcccaggctggtatcaaactctcaaacttcctggtctcaagcagttctcccaccttggcttcccaaagtgctggcattataggcatgagccaccacacccagcctgggtgtctgtctttatgctaaatgtccgagcctttccatttgtcttttgcctcttcataaacctctgctgagctttatcaggtcattcacatctttcattacaggcaagtggtaaacttagtaatatgcttcctctggtgacaatgggcaaaggactagaagcataagtaaagaaatagtagactgaaataagcggattttgacatgcaaaaagatgcagcaaggtgaacctggttaagaaatagactcagagagcttgaacatggaaggatgctaggacaagtggcagctaaggcagaaagacagccatggttccagatgtctggggaaacaatggaaggcagatattacaaagttttccattttgtaccagaagtgtccgtatgaacacaaactcctagtaagtgttcttaattgttctgtgggctgatgtgcatttttctcctacaataggaactagcaatctacatattatttaccaagccttcctagatagaagcatttatgattattttttgtttatataaatgtcttgcatttactagaaaatcatgcttttcgagaacgcatttctattatggagtttcttaaagagagaaaaaaaatgtatggctttagaaaaatcctagtgattttttgacagtatgaactgtattgtgtgttcttgtcttggatcaatatcatggcacaatgctttgatagtgtctgaagattaagatatacaatacaatttcctcccttcccttctttcctttttccttccttcctttttcctttctttcttttccttccttccttcctttctttttctttctctctctctttctcttccctccctccctccctctctctttcctctttctttctgtctgtctgtctgtctgtctttttcttgagatagggtctcactttgtcacccaggcagaagggcagtggccctatcatatttcactgccacctcaaattcctgggctcaagggatcctcccgcctcagcctctcaagcagctgggactacaggtgtgcccctccatgtgcggttaattgtagttttttgtttggggtggttttgtttgtttgtttgtttttgtagagactttgttgcctaggctggtctcaaactcctgggctcaagcagtcctcccactgcaacctcccaaaatgctgggattataggtgtgagccaccatgtccagcccaataccattttcttatgtttcccatatatgcataattttacttgcatgcaattctgaatggatgaaacatgttttaatcacctatttttctactttgtagaagagccaaggtaacatgaactaaatcattaaagcagttgacttgttagtggattgtgataggactcaggcatttcccaaagggggaacccatattttggtaatcccagacattttaattatatttttctatccattcctcaatgccacaatgaggaacagcattctttcctgggaagtctcacaattttgtcaaaagtagaagagttgcctttgacgaatacaaatccagcaataaagaagaacaggtctaacaaatgaggccaccttggaaaatgtcattttgcccctttgagccttgcccatcttacctttagaggaagagatgggactgaatcagttcaaagagcctcgatagctttaaatgtctgtgattgatttttctgcagagcaagatcaaacaaaacagtatttcctagctgctgcccttacatgtagtggtgattcacagagaatttggggaggaaagtagccattatgggatgttttgcaaaaggcaataccaagattgatcatcacctgagggcgatacactatagttgttcctctgtatccatgacagattagtcccaggaccccttgcagataccaaaatccacagatgctcatgtcctgcttataaaatggcatagtatttgtacacagccttgtatatcctcctgaatactttaaatcatctctagattacttataatacctagagttgtataaatgctatagaaagtattgttatactgtatttttaaatgtacattagttttattttttttccgaatacctttttatccatggttggttgaatccacggatgcagaacccatggatatggagagctgactgtaatagtcaaagacaagagtggctggtggtaagcacactatctgtccacaagtgaatttcccctaagaatcctgctggtacatttcttcatttcttgagattattgaaccacgtgatttgcctcactgcttatttcaccttctgggtgacatgggctgtgaatgtgcagttcaaggcctaaatattagccctgattcaaaatggacattaaccaaaaaaacaaacaacaatgatactggccaactgacttctctcacttctctcttctcttttctttaattcattccttacctatttagaatagctgaggctcatttttatcttcttatgacagccagaattgtcatctattaagattaagtaaggaaggcataattgatattcacaaaccaccccaggatttatcagaagtgagggtgtttcatatggattactaattgtctaaaatttggctctaagcacctgaagatcactaggcaggagagaagagtagggtttgttgtacatgagaagaggctgtggggtggggatgttcaccgagaagactgctttggtctttgatactagcatttttccttctatatggttaacaaggcacatattttcatttttatatccccagaataaaggcttgaaaggaaacaaaatctcaaataaatggactaatttgttaaattctggactaaacctcagtttattttaacagctttaacaacggtctctggagctcataacacatatagagcactattggtgtcacacaaaaccttgaaatcagaattgccacagaccgaatctgatctgaaatggcatttcattcaactgcagctttgtgtcacaagaacctgtctctgttttcctaacatgggtatgatgcatattcagaagcagccgagtgatttacttcttttttcattacgcttgtggatttgcatagattcagaaggggcatcttctgggaggtataagagtttatagaaagactaatttcttgactaggcacgatggctcatgcttgtaatctcagcactttgggaggccaaggtgggaagatcacttgagaccaggagtttgagaccagcctggccaatatggtgaaaccctgtctctacaaaaaatacaaaaattagctgggcgtggtggtacatgcctgtaatcccagctactcaggaagctaaggcacaataattgcttgaaccagagaagtggagattgcagtgagccaagattgtgcccctgcactccaacctgggcaacagagtgagactctgtctcaaaaacaaaaaaaaaaggaagattgatttcctgtagacagaaggagtgtttatattggcagcagcaatgcagatcaaaactttggggtcaccctcttgaatatcttatttgtatttcttcttgggttactaaagtcttgaggagaaaaatgaataaaaggcttaagaggattctcatttccatgcaaagcttctccacactcctgagagaagtttagggtcaggaaggaaggtcagacaatataaacctcagcactattcagtaaaatagccatggggaaaaatatggtaagtttgtcttaattcatacccaaggacatttagcgctcagaaaactaaaatactttttatttatttatttatttatttatttattttgagacagagtcttgcactattgtgcgggctggagtgcagtggcgcagtctcagctcactgcaacctccacttgaacctccaggttcaagtgattctccttgcctcagcctcccacgtagctgggattacaggcgcccaccaccacacccggctaattttttttttgtatttttagtagagacggggtttcactatgttggccaggctggtcttgaactcctgacctcgtgatccacctgcatcggcctcccaaagtgctgggattataggcataagccaccttgcttggccctaaaatacttttaataagattgtctcatccttctcttggttttccaatggaaatggtggtatagcaagtccatctgaaacacttctgcaaaataacaatgaagctaatcactgtgggaaacatttacatcatatgtatttgcatacagaggaaattgataatcttgagacatcagcatactagaatagcaagagacatgttttattctattatattctcttagtcagcaatgtttaattgttgcttaaaggaaactgaataaaacgtgggcgcagtggctcccacctctaatcccagcactttgggaagttgaggagagaggatcgcttcagcccaagagtttgagaccagcataggcaacatagtgagaccccatctctacaaaaaatattttttaaaattagtcgagcatggcggtggctccctgtagttccagctacatggagggctgaggtgggaggatcacttgaaccagggaggtcaaggctgcaccctggcctgggcaacaaagccaaaccctgtgtcaaaaaaaaaaaaaaaatacgtaaagcaacagtttttctataacggattgcatggtaaaaggaaggatgactttcttactataactccttatgataattttttccaaagtgttaatcttaggggttgaaatttttataggtaatcattaactttagtagaacattattttaaagtttaggtatttcatctgagtatattactctggctttcctaagctagcttagttatatatgttcacttcagtttgagtctccactaaattttaacatgaacaaaatattatatgcaacaccatagaagcaattgttaaatcattgttacttttaatatcacctaaatctaacctaagtaaatgtgtttatttttattaccaactgatgtagatatacccacatggacagaaaacagcataaaccaccaaaaggacttgaaaattccctcttcaagacttcttttgccaatgactaatgtttaatgctatttgctagagattctggtgccaggaggatttctaaccaggttattttatcaataggaataaaatatcgagggcttaaattagtgtaatctctcaagatcttgaatttgacgttttcataatttttacttaatcatagctcctggggattggaattactcttttagctggcccgagtctgggaggaggatccaaagtctttgagttgttttcttttatttctttttagcccctaaagcactggaaatggttggccctgaagtgctcctaaggtaaccgcaagatgaggcaaaacaggattgagatgaaaaccaagctcacccacatcctacgtcaattagctatttttttttctgtgtaaacaatgggagggaggtggattgtagcttttatggtagaggttcctcggcacctcctgacgcccccaggggtcccccctgccactgccctcagcccaaatataagctgacaacaaaatgtttcttcaaagtgctcattgtttactctattctggcttcttcttaaaggtcatcatcatgttgaattatcttgagaaaatcctctgaagtgtatgtgtgtgtgtgtgtttaggaaggatgtgaggaggattgggaggtgagtctctgaataacaagttgaaaaaagagtatggaggaaagcggtgtttaaaattgtccaaagccatcggccgggcatgatggctcacgcctctaatcccaacgatttgagaggctgaggtgggaaaattgcttgagcccaggagtttgagaccagtctgggcaacatggtgaaaccccatctctacaaaaaaagtacaacaattagctgggcatggtggtgcatgcctgcagtcccagatactcaggaggctgagatgggaggatcacttgagcctaggagtttagggctgcaatgagatgtgagtgcaccaccatactctagcctgggcaacagagcaagaccttgtctcaaataataataataatatataaataaacaaataaataaaattatcctaagtgaaatcagttgttgatagaactgaagtacatcaagcctagtgggactgtggttgtctctccagcctaaaaaaaaaaaagaacaaaaacaacaacaaaaaaacttaactccaaaattgctgttgctccatttatttcaggtgtaagacttctttgagatttaaaaacaatataatcatttacaatgtactttgttggacctaagcataggaaaattcattcattcattcattcattgagtacctgttatatgccaggcaatgcactaggcaccatcaaagatgaataagctatgtgctaaaattcacagtctaacagaagaaacatgaaagcagagtggaaatatactgtggcaatacatatttggatatactggtattaaaaagtaaggatgtttcagctaaatcttttttggtgtttattttttaaaaattcatctattaacttcctacacaccatgcatatattcagctaaatcttaaagtatgagaagaaacatgccattcatgaaagggaagagggagccagtgcatcagatacaacctatgcaatcgtgaagatttatggcagagcacaggatatttggggattggcaggcatttcaaaatggctggcacataaagttccgggatgggaacaggctggcaagagaagagatcatcggagccaaagtaactgaactgtgattgaattttagatatgataatatctataggaaacctggcaacccggtgggcaggtaaatatgatagagcgaagatagaatcttcaggccttcaggggactaagcaggaatagaataattttattgagcactttaagtggacattatgctagattattttacatatttcatctcctttaatttacaccacaaccctgtgagtgcaggttgataaagaattaaataaaatccaggtgaagtagcagcacctatagttccagctacttgggaggctgaggtgagaccattacttgaggccaagagttccaggctgtagttcacaatggttgtgtctgtgaatagccactgcactcctgcctgggtgacacagtgagacctcatttctaaaaaagaaaaaaaaaattgagacagggtctcgctctgccacccaggctggagtacagtcacgcaattacagcttactgcagccttaacccccaggctcaaacaatcctcccacctcagcctcccaaatagcttggactacaggtacatgtcaccacacctggctattttttgtattttttgtagagatggagtttcaccatgttgcccaggctggtcttgaactcctaggctcaaatgatcctcctgcttccaccttccaaagcgctgagattatagacgtgaaccactgcacctggtctagaaattatttaataataaaaaaatgaagacagaattcaatgaagagcatagaagagtctcttaaacctttgttttaagctatgagccaggaaagagatggtggcaagggtgagatggttgcagtgcttttttgttcacttatctcaggcctgtgtgttctgagttaaagacaagtcagttggcaagagaaggagagaggaagcttcccagaaccatttgaaggaaaatttggaaagtcttctctaagggagttgccctcaactaccttttaacacaaatggaggactgaaaaacaaaacaaaacaaaacaaacaggaaggaattgcagatatacagatctttggcctttcaaactatggtatctcttagtactattttatatattgataataattataatttttctcaaacttcccaaaagtggaacattgtgggaaataatatgggagtggacatttgaatttctgtttgactttgcagcagaaatctcttttctaactctctctttcaatctcaccatcagagccatctgattgcttgataacatgattctttttgcccagcccttgttatcctccctcctgccctagtcaccatgacataggctccactcatttctacctaggaacctggatgcactgctttgcactattgcctcctggcaaaacagggcaatgagaaaggaaatggaagcccaaattcagagccctccttcccagcacaagaatgaggagatgccctttttccccggggagggggattcttccctctctcttcagtaattgtctttatcactgtcatgttctagccagtctttattatccccgccacacaaatttcatgttcttctggcagtcaaatcaggaaattcaaggacacaactgctctggcttcgtaaagatggggatcaaattgtttgagttgctgatagcaactctttgcttcttgattctccatgcctcctcaagcttttttggctgaacttttagccttggaacagggtcactggaaaatacttcttaatatccttaatttctaattctaatatttgccttgtttcattttgtttatttggggaggatgaagttcaggtgttcacctatcaaactcacttccttcttttttttagacaaggtcttgctctgtcgcccaggctagagtgcagtggtatgatgttggctcactgcagcctccacctcccaggttcaagtgattctcccacctcagcctcccaagtagcagggatcacaggctcgtgctaccacgccccactacttttttgtattttttggtagagacggagtttcatcatgttggccaggctgatcttgaactcctgacctcaagtgatctgcctgcctcgacctcccaaagtgctgggattgcaggtgtgagccaccgtgcccagccctaacttccttctgatcaagtcattctcaaaaataaacatttaattgactgtcaactacaatgataataagacaatgtttgccttaaatgagctctaaatctagttgaagggataacacatggaatggactggtaataaaaagtgggctttgcttggtgctacagttgtgatgtgaactaaagagggagtgttttggactgactttgagttggggaggctttatggaggaggtgacatttgagttgggccttacgttgtattttatgaaataaaaaaagaggaaagacagtccaagatgagaagacagtataaataaagggacagaggcatggaagggaatttcttggccaaaggatagtaaaaagtacagaaccactaaagtctagagcacataggctagaggctagaataagtgagaaatagctaatcctaggaagataaattggggcttaattgtaaaaacctttgcatgctatactaagaagctttgagttcattctcttggcaactatgagccattacatgtttcaaaagatagatctgatggaaaaacagaagtatagagggtaatattctaatgtgtaaacttctactgtgagtccaaaagaatatggtatctatctctgaaccatgttcaatattttgcttagactgttcgaactatgtaagaataagaaatactaaagtgttttttctctgatataatatttaaataccttttagctatcaattccttctaatttccctttaataagacatttactacaaatagacatcattcccatagcaatcttttcttgagacaaagaggtcagtaggccaggttctgcatagaatataagctatttttccattttagaatgccactctccattgatgtctactctcgttaagtagaaaattccaagaagtactaacaaaattatgttaatttgtgtatgtactgacttccagacatttggaaccagattctgaacctgtaactcatttaaatcttgccgtgactttggtttcccaagttctaggtctttctctgaaaatttaaaatgcttctggaaagatattttccatgacacttttgccttaggaaaaaaatttttggtcaacattggaagaaaaaaaaactgagacaacatatatcttgctccttaacatattctgtatgaaattaaggtcttattgacaatctacgtatcagagcctcgtacacaggagctattgaaatgatgtgtcagttcagaaaatcatgttcattatttctgattctcatcataaacaagcagtaaatcaccgtataaggggtgtatgcattagggcctcccacataaacttcacctctgcgtgtgtaaacattttcttattatcgcaaataatcaacaggagaagagcaaatgcaagtttagcttttctccagaatgtttatcatggttactttaaactgtttataggaaagagtgaactataaatgtctttcaggaggtgggtaggaccatatggctcagaggcttttctgcagtaaaatgtttggttaaattttaggcaacagacagtccttccacagcaattatttgtgatttcgagcatcgttgttgatactcaactcctgaaacaaataacaccgacctaaaacatttataataactgaagaaaccaggttccttttaaccctgctaggatccagctgcccccttgcaacccatccccagtcagctgcagctcaggcaagcccagcctttccatccctgcacatcagactgtggtgcagagaaactccctgtgttcttcaaaacaaacattggatgtaatccacctcaatcttttccatggtgaggctttacaaattttagttttctctaagaagatagcctgtatattcaattgcctgggtaaaagtttaatttctgatgcgtaaagcatatcctgccttgaaaaatatctcaggaaaaataaaggccacaacagtttcatgtgtgcctatatcaggattgctgctgagtaagttgtgaaatgtttttggatttctgagccatttggatttcagaattgtggaggaattctggatctgtattttattgtgtattaccaattattttcctttctcttttatgtgacgggtagtattttgattatttaaaatcatctttgtagaaaaattattggcagctatgaatttcatttcaagatatttaagatgccttagaaacttttctaaaaacagtataataggattgagaaccactcatgtatggcctttactgtttcgaggtttttcttttttgacatgtattatttgatgaaaccctatgagattaggtctttacttccgaaagaagaaaaccaaattcaagggcaattaaaaacttgtcaaatgtctcaattttagtaagaaaaaaaaccgacattggcctagatcttaatctgtgcccagtcctcttcccatccctcttttttttttttttttttttttttttggtggctgctctcaaatttttgggctcaaatgaacctcctaccttggcctcccaacgtgctgagattacaggcatgagccaccgtgcctggccagctaaggttaatttagtattgaagaaatatttttgttatgaatttagtgtagccaagtgtgcagtgtttagaccatctacagtaatgcacattaatggcctaggccttcacattcactcaccactcactcactgactcacccagagcaatgtctagtcctgcaagctccattcatgggaaaggcctcacacatgtataacatttttttgtcttttattctgtatttttctatgtttagataagtttagatgtataaatacttatccttgtattacggttctctagtgctcagtacagtgacttgctgtacaggtttgtagcctaggaacgataggttataccatatagccaaggtgtgtagtaagctgtaccatcttggttcgtgtaaggacattcagtgatgaaattgcctactgacacatttctcagaaggtacccccatcgttaagcaaccattactgtattagaaagcagaaaaacaaattcagctccggacttagcctacccatatagcatcattggccagaagaaaatcactttgctttatgaatcccagttttctgcgggaatgaaatgaggtaccatacgtgatcctaccagcataacacctgccaaatagtgcacattcaatactaaaccatcctttttatgcctataaataaaggatttgtactatatcaagagcttctctatgtctgaagttacaatagagtaattccaaattatctttcatggaatcaaatccctgatgatcccttgattttctgagttctgtgaatttcatcacagcccaatttgacccattactgctaattcagtgtttttattagtaaattatatttccaagttgaatcaaaacaacagtatagcaggcacagcttaagacacaagataaataagttgttgcattcaccagtcaaaatatttttaaaaaatcaagaagcaatcactgaatagttttccttgatttagataccaattaggtttaatgaccaaatgagactgataatcagagctgaggaactcaatcaacaggattgcaacatgctttttttaaacctcttgaaagatcacatcactacagaataaggaaacctatttatttatttaatttgagacagtctctctctgtcacccaagctggagtgcagtggaatgatctcagctcactgcggcctccaccccagttcaagcaatttcatgctcagcctctgagtagctgggactacaggggcacaccaccacgcccagctaatttttttgtatttttagcagagacaggttttcaccatggtggccacgatggtctggaactcttgacttcaagtgatctacccacttggtctcctgagggaaatctatttatgactaatgctgttctttttactaattgtttcattggctgtcagcccttagaggaaaaactgttcaaacaaccttttattcatagacccatgttatttaattttagaattatttcccatgtatgcacaaccgaattttcattttcataacaagaaaacaaattctttaagtgagaaacagtacattttacacccttccttttcacaaaaatctcacagtattttctgacttatggtcttgataattagcactcctgtttgctcgtgttctctttctttcacaagcaatgtgatcttatttttaaaaaggacctgagacaagtagacaattgacccttgaacaacacagatttgaaaagttttggtccacctatacacggattttctcccacctctgccacccatgagagagcaagaccaagccctcctccataccctactccatctgaagatgaccagggtaaagacctttatggggattcacttccacttaattattagtaaatatcttttctcttccttatgattttctcaataagtttcctttatctagcttactttactgtaagaatacggtatagactacatataacacacaaactatgcattatcaactatttatgctgctggtaaggcttctagtcaacagtaggttattaatagctaaattctgggggagtcaaaaggtatatgcagattttcacgggtggttggacccccccagcatccatgttgttcaagggtcaactgtatatcctaattgttatttgacactggaagaaattagatctcctggccgggcgtagactcacgtctatcatcccagcactttgggaggccgaggagggtggatcacctgagatcatgagttcgagaccagcctggccaacatggtgaaaccccaactctactaaaaatacaaaaattagctgggcgtggtggtgggtgcctgtagtcccagctactcaagaggttgaggcaggagaatcacttgaaccctggaggcagagattgcagtgagatgagattgtgccattgcactccagcctaagtgacggagtgagactttctcaaaaaaataaataaataaataaataaattatatctcctcttagaagtttgtccctctcttcaactgaaatctatcacagttcgacctacatggtagttgcattgatctgtccatcctggtgccacatatagaacatctactttgtcagatactgttccacatacagtaagcagaacacatgatcccagtccacatgaaggatggtgtccagtcatgtatggcctgattcttttctgtaaagtgctttcacatttgtagttggttcctttcctagagcactcctgtttttgcattcttgtagaaagcaaattatttccaccctgtcactgatttttttctccaattcaaacaatacgaactagaaaagagaactcccttgtaatataaaaggaaatagaaatccctatgtattcaatgtttttaaagtttaatatgattcctcttagcaataaccagcaaaaagaaaatgtttctactttaatcttttcttttgaactgaagtgttcctctatgtcatttacatgacaattggcccaaatctctctgttaccaggacttggtattcaaagtaagaggcttcattaaatttcaagaggacttttttggggaaagtttttgtttgttttgttgtgttttatcataacaaaacaaggcatagtgaccaggaagatggagtttctagttagtgcatacatatacatgcttatggttacttaatgtgatagaagcaaattattcagatgcctcttctccacagaaggttttggtcttcagcacgtaaagcaacttttttttttttgtttttttgagatagagtctcactctgtcaccaggctggagtgcaatggtgcgatctcggctccctgcaaactctgcatccggaattcaagcgattctcctgtctcagcctcctaaatagctgggactacaggcacgcaccaccacgtccagctaatttttgtatttttagtagagacggggtttcactatgttggccaggatggtctcgatctcttgacttcgtgatcctcccgcctcggcctcccaaagtgttgggattacaggcatgagccactgtgcccggcctcatgtagagcactttaaaagtacattggatccatagtaatcacttaactatgaacttgtatatccatatcaaaacttcatgttgtacagcttaaatatagacaataagaataaaataaataaatgaaaatattttaatatgctgagccatgttctggccatttttctctggccttatgtagctttagcttttcattctcaaagcatggatcaaagagctataagaagaaattaaccagagactttatcctgattgtttcacatttccaaaggcaataaatcagtcatgggctgagagaagagaactgaagtctaccacaacaaatatatttctgccattttttcttttatttcctataggttttgctttatgaattttgacatgatattttcatcatgtgtagatatcatacctctttatgcttttattgcaggtgaagtcatttcctaacatcactgctccctctcccttctcccagcagttatctatgtgaaacaaataaatgttatttgtgaggttcagctaattcagataattagcattaccaagaggcttacaattattctggaatttgtgtttgcttatttgtttccccaaatacagctaaaggagaggagaggatcaccagatcttatagtaggcaaaactatgaattattagtaaatcttcctcctggctttctatctcactggctgctcattctcattgtccttcactctttctcctctgtttaacttccaaatgccaagcatccctgggagtattctcttcatttattacattcactcaaatggttttaaataccatacatatactgatgacacctaacactctagttctcgtctgtgtctccctgaactccagactcgtaggtccaactgacttctgcatatggctgtccagtcggcatctccaattgaacatcgtcagaacaaaacttcaggcttttccccaaccagctcttctggtcttgcccatctcaataaacaccactgctatctacccaattaattgagccggctatctggtagttattcccttctttgcctcactgtcttctgatccccatatcctataaactctaataccaagtatccctggaatcctttcagtttttcctatctttacttcttctccttagtctaagctattatactctcttgcatagtttagcggtagtttttaagccctttttttatttttattttacgtttgccttttctaacaaattctccttaaaacagccagaatgatctctttgatgtatgatttagccaagtgtggtggctcccactagtaatcccagctactccaggaggctgaggtgggaggattgctgggagttcaagaccagtctgggcaacatagtgagaccccatttctaattaaaaaaaaaaaaaaagaagaaggaaacatgaattagattttgttgctcccttgtttaaactctctattggctttttacttcatttagaataaaatgaaactccctgtcctggcccctatttgatcttatttcctgtcactttcccattgtctgttatacctcacaatcactggactgcagttattgctgttcctccgaactacaggccttagggcctttgcaattgctattttctatggctggaacactttctcctcagatctgcaaaagattggtatcttgtttagtcagatctcaaattaaataccacactctcatagaggccttctctcacctcaggctggtgttggtagcagtcattgaacttcacaacaccttatgttaatgttgtgcagaacacttaccactgcctgatattttactgataggtcttttgtctgtttcctgccactcctgcccctgaaatagaaagcaagctccatcagagaagaactttatctgtttgttcacggcagtaattccaggccttggaagagggtttggcacacagatgttacttaataaacataagagtgaatgaatgaaaattgttagaagacaccatctaaagtgagtcagacaatatgtccagcttcttgtgtgtgctaattaatgacactttgtggactatatatctgtatataactacttcatttcttacagagccttgatagatgaaagtaactagacatttaacttaaaaggtgctaggtcatcttcagttccaggctgtaagcattaagattgactgtacacgacctgttaaaaccattttctgggaaaggctcttaagtacctgtcagagtttacaatttgagagcaaacataaataaacccaaacgcctttcaactttgaacatttgatgcttgaaaatcacctctatttaaatttttgctagtcacatcttctcatcttttggtttcaggacctgattcatcagtttctatagatccatttataaactcagtcagcattttactttgccagcctatgagcacaagtaggcaactggaggcttggaaaaaacccagacaacaacaatttgtttttcactggttctgctttcaaacaacttccaagagcacaatacagcaaaaagtgagagttatctatttctcccttcttcatccgaatacaaaatacatcctattttactgctttttttttgtcttttgcctctactttaagacttatctaagaaataaagaaaagccaaccactcgttctatccacagaagaaaaacacacaccagcatagacaacacaaaagactgtgtctagatgttaagactatatatcctataggactataattttcatagatctaaaaagtgagaaacatatatatgtataaaattatgtgggatgcaagttactgagattttgaatatggggctctgtcatttaccctaaaatgttcagtggtcttttctattttttctctattctcagtaaaatagaactttctcaacaattctggctcctactcttccaatgggctcagcttgtctcatgatttaatagtactaaaaaccttttcttaaaaagaaaaaaaatcctttttaaaaaagtttaggtataaataagaaatttctatattatgaaagactggtttgcaaagaaactttaatatcttctggatctcatctcaatcacagtctatgaaggaaataaaataagtgccttctaaaacggcctattatactactatagctgttgtctataaggaaaaagtttgttagtgagttgtattcaatagaaaacctcaaagatggctgggcgcggtggctcatgcctgtaatcccagcactttgggaggccgaggtgagtggatcacttgaagccaggagttcgagaccagctttgccaacatggagaaaccccatctctactaaaaatacaaaattagctgggtgtggtggcgggcgcctgtaatcccagctatttgggaggtgggagaattgcttgaacctaggaggcggaggttgaaatgactctagatcatgccgttgcactccagcctgggcgacaaaagcgagactctgtctccaaaaaaaagaaaagaaatcctcagagaagatatcctagaactatttagttttcccttaatcgagtctgaaaacctcctgtgcccttccaccacttaataatctaaccaactattgtaaaattacctattcttctaaaccaccaaatagttcgaatagaatagccttagatatctaataactaaatgaaaccacagtttacctctctaggcttcagtttcttcttcataaaataagaagcttgaactcgaaaagttttagatgcgaagttcccaaaaatctagtagaggaagcaaaactctgtttggcaccctgtttccttgccctggacttttagcatttctttcttctggtgtaaagtcaaacaaaaaatagagatgaatctctaaatttacctttttattggggagataagagttgcaatacagggcatacacacagacctgatagtcttctgtatgtcagaagaacaaagagaaggttggaggttttacgaaaaggagaaatgtcttgtcctgaaagaaatttcactggcactagtaaagttgtggggagtggcaacctctgattggtgagtgacaacagtgcagtaggtaaaactaatcttagactcacagtggttgtcttagctgctattagataaaagtgatttcaggttacagcaggcagtttcagcagctaggtttgcagagaattacattcctagaacatgatattttaatatacatatccattgtgaaataaatactataggcaagcaatttaacatatttatcactttccatagttaacatttttgtaagagcacataaaatctacttattctgcagattttgaatatacaatacaatattatttactataatctttctgttgtacattagatctctagacacactgattctttttttttttttttttttttttttgagacggagtttcagtcttgtcactcaggctggagttcagtggcgcaatctcggctcactgcaacttctgcctcctgggttcagatgattctcctgcctcagcctgccgagtagctgggattacaggcatgcaccaccatgcccggctaacttttatattttgggtagagacagggtttcaccatgttggccaggctggtctcaaactcctggcctcaggtgatccgcctgccttggcctcccaaagttctgggattacaggagtgagccaccatgcctggcctagacatacagattctacatgattacaagtttgttccctctcatctactttccattttctcctctccctgcccctggtaaccaccattctactctctgtttctatgtatttgatttttttttttttttaagattctacatgtaagtaagatcgtgcagtagttttgtttctatgtctggcttatagttcacttagcaggttcattcatgttgttgcaaatgctagaatctcctttttaggttggataattattccattgtgtatctataccacaatttatttaccgcttcatctgttaatggattcttaggttgttttcatatcttggctattgtgaataatgctgcaatgaacgtcaaagtgcagatatgtccatgaggtgtttatttcatctcttttgggcatacccagaagagggattgctggatcatatggtagcagaatgttttatttggaagggaaacttttatactgttttccataatggctataacaatttgcattccctctgaaagtggacaagggttccctttattctacactctcaccaacacttgttatctcttgacttttttatacgagtcagtgtaactttaaatccacctggcctgatgctaaattatgaatgggaaaaattatattaatacttagaatcctgactgggtgcagtggcttatgcctggaaccatagcactttgggaggctgagatgggaggatcacttgagccaggagttcgagaccagccagggcaacatagtgagacctcatctctctaaaaaataaaatattagcctagtttggtggcacatgcctgtagtcccagctactcaggaggctgaggtgtaaggatcacttgagcccaggaggtcaaggctacggtaagccatgattgcactactgtactctagcctgggtaacaaagcaaagcaagaccatcttcacacacacacacgaaaaaaacttagaattctttttttttttttttttttttttttttttttttttttttgggggagggtctcattctgttgccaggctggagtgcagtggcgatcttggctcactgcaacctctgactcccaggttcaagtgattctcctgcctcagcctcccgagtagctgggattacaggtgcctgccaccatgaccagctaattttttttgtatttttagtagagacggagtttcaccgtgttggccaggatggtctcgatctcctgacctcgtgatcctcccgcctcagtcccccagagtgctgggattacaggcgtgagccatcacgcctggctaaacttagaattctttacattcaaataatgtctggtatttttttacattattttcatgtatattccctaatttaaacttatccccacccccccccaccccaccatgatgtcgtcaacacagaactgttttctagattaggaaactgaggatagggattttaagtatctcgctcctagatcaggaccgcatccaggttgcagaatcccaatccagcactcttccacatagtcacagcactaccccaactctaatctactgatgacacagaacaaaattaaagtccttgtccaaatcccagagttcatgaacacagagatgttaatgctcctgtagttcatactgcaaaaagaatgtgagagcttgtttcatttttcacttagaaaatgtatgagatgttctttctgaaggggttctgtcactaacaggttgcattacttgtacaaccattatatctgaatcttcccagaccgtggtttttttttgtttgtttgttttgttttttattaaatactgtcattaaaccagaactcatggatatctatgtcatttccagctataaaattctagaaacttggggattttacctttttgtttcttattttattttcttttttatcaaaagccttatcacaggtaaaatggtaatctaagcaagaataagctctgtcatgatttatgaagcatggaaattcagctgtggccaggcacagtggctcacatctgtaatcccggcactttgggaggccgaggtgggtggatcacttgaggccaggagttcgagaccagcctggcccacatggtgaaaacccgtctctactaaaaatacaaaaattagctgggtttggtggtgtgtgcctgtagtcccagctacccaggaggctgaagcaagagaatcgcttgaatctgggaggcggaggttgcagtctttagcatgggtgacagagtgagattctgtcttagaaacaacaacaacaacaacaaaaaccaacaacaagcacaaaccaataatagaaactttaaatgattctgagccttgagaggaatgtgattatgcaacctgggaaattcacctgcccatgaatagtatctctgtaattaataacaaagtcttacaggacagtccttgccatcaccatatcataaacgtatattgcttcttttagttcataggaacagggtctcctgctgtgtcatagctgtaggatttagcctaaatgctcagtgagtttgatgctcccttgagcaagcccgcttatttaagaaagtagtttttggatattcatggtttattgctgacagttaacgttctcaaaatagtgagagtcctaaagtcaaaggggaatttattaacaattttatttctgagaggatatgacaacaacaaagacattaataaaaaacaccagcgagctttctggcaatatgtattaaaattttcaaaaacacttatactctcgaatccagcagttattatttcgggaaattgctctaagaatattatctttttatacaaagcattttctgaagagaagtattcaggaaattttcatttatgaacagaaaaagtccaacattatggaaatagtgatataaaatacagcatatatagttctttggtattttacagtcatgtaatcatggagagaaatacttcagataaattaacataataaaccacaatacaaaaaagtatatttacaatagaaaaaaagtttaaaagtgtgttagcaatacaaataaacaaatacaagaaggatctatcacaacaatgctacagtgatgagccttcagataattttcattatttttcttgatacttctatatgttcaaaactttcattaatgagcctgtaataccagcactttgggaggccgagatgggctgatcgcttgagctcagtagttcaagaccaagctaggcaacatggcgagactccatctttacaaataatacatacatacataagtaactaagtaagtaaattagccaggcatagtggtatgttcctgtacttccagctacttggagggctaaggcaggaggattgcttgagcccaggaggtcaaggctgcagtgagccatgtttatacccctgcaatccagcttgagtgacagagtgagaccctatttcaaaaaacaaaatttcactgatgacaataaatattaccttgacatcaaaaaaaaaaaaaaaatccagtgcctggatgatcacccagtagcatctaaaagtgcatttgaatatatatccaggttctgatgccagcattgatgcttgttatgtgacaaaaagaaatcacctaactgctttgggcttccatttcttcaaagtaaaatgaagtggttaaacaggattactccccagatgtctccccaaactttacactggtgtaataattgtttgcaaggatcattgggtgattatgtctaaaagcctgcagttattagtcctcatatcaggaatgtgctatccccattcattttattgtagaacctggtttgctgtgggatagttgaaatttgaagaattcacttggtcagtgtgtttcacggccttgctactttttctgcttggatggactcacttctctatatgattttctctttaaatcagaagtatttgacctgaagcagtaactcctctattcatataatagtgatattctgatacatatgtgaatattataaaaataagtagaatgataatattattactaatattattgtggcagtaataatattatcattcacatgtgatcaatagtaaaagcacacacagcaacccctcaggatttcatcctcaggccattgactcccatcacctttactgatatttagcttagctttacaatcctcccctttgaaaaattcatattttaaccttgcctcccataaagacacacattttttcagatatagaatttgcaaggctgagacatatctttttagaatgaacccaatataaacacaaagcaacataggagaaaagtactagttacatgcccatggcaagaaaatatgcctgaaatggttctgtttattttgttgttgttgtttctgcttggaatttcagcagttatttggcaaagtgattagctagctgggaaggaagaaagctcgtctccatcagccttttgtcagagcccgccttttggtcccggagcccccatgaaagtgtgctgtagaccaggaccactgttgccctgaatgcatgagtatgcagcctttttatcgtaggcttgtcatctcctgagttctgcaatagatgccatgtgaaatccagtatatactcagtctaacacatagctgctgcataagaaaatttctttccatgcttaagcaatttctgcatagagcttaattcatagaaatcacttattcattcaaaaagcattcactgagttcctagtaggggccacatattacgctaaagtagatacaaggataaaccaaatgtagatctgtcctttaaagagtataacatgtagggaacaactacactctacatggcaatagaaagtcacaagtgggtgagaaccacaggagagaaacagtcagagggtgatgacagccagaactggtatgatgtgaaaggtcaatgacatcagaaacggcctcagggattttatagcctggctccttcaatttcagttcttggtataggccagcttttcaggactgttgattgtccctcttctttgtgtgaaattcctagtgcacagagcttctgcagtgcctcttaggtactttgaaaatcccaacgataaacatctggacccaacacagaagcctccaggaagctgtcttgttggcagtcacctacgagcaggcgataaacacaacacattaaatagtatgtaatgctccagggattgcagtcctctgcctcctaatctctctgtcctttcctcttttattgacttgtcaggagcatgacagttgtgcacaaccattagcacacaagaaatgactttcctgtgggggtgatggggactggggaacctactctttgagatagaaagttaccctgatgcagaataattacagtccagcttagcctccttataagcgattaatcttacttttcctcttagcttctgtctgtttgtaacctgaggttgaccgaagttagttcttttagttggttcttgagaaaaccctttcagtctgtatttccaggaataaatcttaactctaatttaaaaaacaaaagggccctataaatagttacttcaaaccctttaatttatagctgcattctcaatgtcttcatcctcccaaaatcactcacctctacatttttgccctaagtacctaggttagcacaacttttcacaacttctctttaacatttctctgaataacgtgaaccttccttatttccttaaaatataaacttatatatgttcttcctaggagattttcaacttttctgttctccacttattactctattcactctgttctctatctgagctgtcactaattagtatctacttaaataaatatttgagcaatttaacattacagttttttttttttttttcagcaagaagtgtgttcattatccattaaaagcctgggagagggactactaatgttacaccatcaatatctatttttagccacttcggttttggaagtgtctcttcttttggaagtgggagaccaagtggaggggaagaacatgaacaagggattgaagccattgagaaagtcatttattcattcgatagatatcttctgagcactgcgctaggacctaaggacagaataatgaaggcagagtttatccttccactagcacagcagtcaaaaccaataggaattaagattgtcagaagtgacaaaactgtacatagacctgttcacataactaacaagggaaacgatggaggtgatgtggaagtctgaacgtggtgcaggaataactcagccaacatccccctcctttgggaaatttagatagatgtaggtagattgagaagtgatataacagtcatgtggcatcattgagagagtcagttttctataatgacaaagacatggaaagagagatgtttagtacatgtacagcagaaggagttgattcacaacgcaatggaaacagaagtcaagaagacagtgaagtggatgaagcaaggagaaatcataaaaacaagcacactgggactgtcggacctcaggggagagtgacgtggatggtaaaccaagtttggggccagagaaaagtgaaagcttgtgctgttcttgttggtagtcatgggcaggctgtagcagggttattattaaaactctgatcccccaagtccaactgaaggggctccagtcactaccccatcatctcagtggtgagatgtagtcaaggcatctaacctctctgcctcagtttcctcatatgtaaaatagagacaatcattataaagtgtttagcagaatgccagatccacagtaaatatcagtaaaaggaaatttataaatttgtaaattgttagggaatggggtgagaccctcaagattctaatcttcaagggaaagaggatgctaaggaaagtcagaggaagcccgagaatcctaagagaggatgatacaagcaaattaattaaggaataagatcaaagaatattgggaaatgtttaatccacttggtgtgggaaaaggacttttttgtttgtttgtttttgagacggagtcttgctctgtcgcccaggctggactgcagtggtgcgttctcggctcactgcaagctccgtctccctggttcaagcgattctcctgcctcagcctcccgagtagctgggattacaggcgccagccacaacgcccacgcccagctaattttttttttttttttttttgtagtagagacggggtttcaccatgttggccagattggtcttgatctcctgacttcatgtgatccgcccgcctcggcctcccgaagtgctgggattacaggcgtgagccactgagcccggccgaaaaggactcttttttttttttttttacacagagtctcgctctgttgcccaggctggagtgcagtggcgccatctcggctcactgcaagctccgcctcccgggttcacgccattctcctgcctcagcctccagagtagctgggactacaggcgcccgccaccacacccggctaatttatttatttttttctttttttcttttttgtatttttaatagagacggggtttcaccgtgttagccaggatggtctccgtctcctgacctcatgatccgcctccctcagccttccaaagtactgggattacaggcgtgagccaccgcgcccgaccatgaaaaggactctttttaacctcttctccatgtctaatctgagtttcaacctttttattcttattctgttataagtacttctcccattcaagagcatataaaactagaattactttgggatgagtgtgagtgggggagagagaaggttgggagatcactagttgtgtttgctggtactgaatcctaccctaatacttccgaaatgaacctcattggataactcaactcttcattatgtttttgctaatcttttaggagcctttttgcaacccaccgtctccctaccctcgttgggtctttttttttttcttcttcagtcagggttttgctctgtaacccagtggggaaagtggcatgatgatggctcactgcagcctcaaattcctggactcaagctattttcccgccttaccttcctgagcagctgggactataggcgcatgccatcatgcgtggctaatttctaaaaaatatatatttttgtagagacatctctctatgttgcatttctggtcttgaactcctaggcgcaagcaatcctcccacctcagcctcccagagtgctggggattgcaggctgtttaatagaagttatcaacatatggagtcatttatgtctattgaaatatgaacagccaattcccttcacttgtcccatttctaattcagacactaattctgtttcagtttaacttggatcaatggacttatctttgcttctgttcagttatctgtttcaacaacaataagattctttatctatatggcatagtgggtgaaaggacacactaaccttacctactgctccttttatgtcagaaaatccattttctaatcactttttcttggacccaagtgagtctgttttttcccctacattttgtaatttgtcacatttacattttaggtgggttgttctaatcgacttttcttataaaagggtagtggttctagatcaatcgccatcaatcatgctaccaagcaatggtgaagtaccctttttaaaatattttatttagaagaatttcttatttcagatacaacagatgatacaagttgaatctagtagggtttagtaagagacaataaacatattaaacaaagccttacgtattttttaaggtgaaaaaaatcccccaagatagagtccgtgcttagaaactacccctgttaaatacttaatatataacatttgtaatgttcaaataccgaaagaaaaaaatgtacttgttcagagtctattcttgagtcaacctaccttctcagctctactgaccccaaacaaggtaaacaagctgatttaagttacaactaacttaaaaattatacatctaactcttttgtaaataactttagggctggtgctcaaaataattggaactagctatgaaaagaaagctagaaatgagaatgaggaaaattggtagtaagtgtctatagagaagtgtggaccatctgcaattcctatatttaaacagggagaagagggagatggggactcactctctccctcacaaccacatgactaaactggcccagccaatatctcatcaggtgtctccaccactttacaaagccactgggaatttatcaagggataaatacaaaactggtgtagggagaggggaatgggaagttacttccaaagactctgaccctgagttcttggcgtttattcttttttttgagacagtctcactctgtcgcccaggctagagtgcagtggcgcgatatcaactcactgcaacctctacccctgggttccagtgattctccagcctcagcctcctgattagctgggattacagacacccgccatgacaccctgctaatttttgtaattttagtagagacagggtttcaacatattggtcaggctggtctcgaactcctgacctcaggtgatccacccaccttggtctctcaaagtgctgggattacaggtgtgagccaccgtgcccggcccttggcctttattctttattttccctgatattaatccctaatgaaatgcatttagtacacattcatctttttaaaatgtgcagtttttgtcacagaagtagtgtaaaggacaccagaatggttggaagacgatttttgtggtcttctacaagtcctgttttggtgactctgagcaagtcttaaccttgcctacatttcctcacatttagggcaagtgtactcttcagggtcaactgcaatatctgtgggagtgctttgtgttttgtagcatgcatcttactagtgcttttgttgttgtttgcgttgtcgtgcgggttccccacctcccccataacactgtaaagaaatgctgagactaagtggtagggagtggcagccatctggtgaggatggaaagttaatatctttatttatgtaataaacctccctttagaattctgttactgtcaaatttctcctggaattctaatagtattttcgctatgtgttttgaccttttgctattgggaagacacaagtttatgaatgacaaatgggtaggggaatttaggctgcacagttaagtaggaagaatgaagtctttgctagagttagaatccagtttgaccttgaacaagttactcaatgactaagctccatttgcaaaatcgttttgttaaagggattagaggtaacatatctacatatgtacatgtgtacagtggtatggagaatggactggatgaatgcgtgctgttaccaatgtgataattactattctttttaaaaatagagtattttatgcatacacaatacttattcaattcaatttgccttagtgcacagtgatggaattttagaactggaattgacttcagaaataatctggtaaacgaaatcttttcgaggctcttcattttatggttgaggaaactaacatcctgagagctaaaagtcatcgttttcctttaaaatatctaaataatcccagatgttggatcagaactccaaagtcataatcagggcttttcctatttctatagtatttctaatactataacatgctattgctcagtcttttattctctaattccatcctggtttctagaccaaatatacctaattgtattctaacccacaagtacctcatcaatgagaagtctgacctatggtttatgatttccgcagacttaaatcaaccctgggcttctatccttatactagttttattttatgttttttgtttgtctttagagaaatgatcgtgttctgtcatccaggctggagtgcagggacataatcacagctcactgcagcctcaaactcctgggctccattgatcttcctgcttcaacctgctgagtagctaggactacaggcacgcaccatcaggcccaactacatttttaaatttttttctagagacgatgtctcgccatgtttcccaagctggtcttgaaccctggcctcaagcaatcctcccacctcagcttccctaagtaccaggattacaggcataagccactgagcccagccccacccttacatgttttctcttggcatcctgatccctggacacaaccccattgagatacccttccatttaatacttttcttagtcatttaccaaatgtgtttatagtaatatattcccatatatttgtggcagagtacagcactcatataaattttgatgaacacagacatgctgtcccatacttgtaggtaaaacaatcatgtgaaattaaaataaatattttgtttagatagatcttgactatcatacacttattctaacaatattgcccattcctcaaaacattctgggaactccttgaaataaaactgactatggtaagaagagtttttctgggagttgggaaactgattccattagaaggcagatggtgatagtctcacagcacactctctcccatgcggtctctattctacaggcatgcagatatttccaaaagcatcccttccctccagggtcctgaagaccctacctctggttctgccttggactgctctcagtgatattccctttttttttttttttttggacggagtctcactctgccgccaggctggagggcagtggcaccatcttggctcactgcaacctccgcctcccaggttcaagtgattctcctgcctcagcctcccaagtagctgggactacaggcacgtgccaccacgcctagctaatttttgtgtgtgtgtgtgttttttttagtagaggtggggtttcaccatgttggccgggatggtctcgaactattaaccttgtgatctgcccacctcggcctcccaaagtgctgggattacaggcgtgagccactgtgcccggccgatattcctgtttttatggttgcaattgtatgctatggcaccggtactatgtgggaagaatgatgctaggtactctactggtatggcctcatttgtcgatttgaggattattggtttatttatgcaaagcacataggatcataggattgctctctaggagaatggagtaattaataccatgaagactcatagacaatgcttcctcccctagaaactcattatttttcgaattttggcactgatctttcctgcctacttcctggcttttactaccttgtgaaaaagccccaagtgttagaagcagcttccccagcttactgccatcccttctaaggtccctggacaccactgcttgtctcctaccttagaaagtgcctacttggccaggcacgctggctcacgcctgtaatcctagaactttgggaggctgaggcaggaggatcacgaggtcaagagatcgagaccatcctggccaacatggtgaaaccccagctctactaaaaatacaaaaattagctgggtgtggtggggcatgcctgtagtctcagctacttgggaggctgaggtaggagattcacttgaagccgggaggtggaggttgcagtgacctgagatcacgccactgcactccagcctggtgacagagagagactctgtctcaaaaaaaaaaaaaaaaagtgcctactcataccctcctcctatttattctgatttctgtgcatgtattctttttgtttgtttgtttttcagagacaaggtcttgctctgtcacctaggctggagtgcagtggcacagtggcatgaccatagctcactacagcctcaaactactcctgggctcaaaatgatccccctgcctcacctaccaagtagctgagactacaggcaaatgccaccatgcctagcctgtgcctgttttcttaaggcagaaatgatctaaaagtgtggcagagggaaaagaagatgggacttagagcttaaataaatctagatgaaaatgttggttctatcactcacaggttctgtgatgttagggaagttaagttatttgcaataaaaattattaatattgtagaacatgtattgatcctatgtatcaggcttgaattaggtgctttaagtgggttgtctcaattaattcatcactctgattttcaattttctgttctaagaaatgagatcaaatatgcctatcttgccgaagagtagtaaaaattagacaggtagctgcctctggatcctgcagggtagagaaagtattacatatctgcatgtgtggatgtgaaggacacacagatacataaggtaaatgagaatttattataaaggtgtatttgacaaaaattggggaaaaaaggaaaattggagaagatatctttctgtgagattaaagacaaataggggaaaaaagggaccaatgacaagaattagagcaaggtatgtaaagaattccagagctggctctaagagatagagcagctggtcatatatgaaagggatgattcattcttcaggggctatccctcgtgatcctatttccttgcacaagctatcagttaatttattgattcacctcctttatgtgctcataggcatcaagaatacaatggatcacatacaattacagaaaagtttcatttcaggaggtcaaacaggaagtttctttctgacttatattgaagtactcatgatgacaatggagaaaaatgaacataatcttttatgggtggggaccatgtgatctcttttctttcaagctccagagggtttataagacatttccatgttcaatttgattccggaaattatatgttgggtagaacagactctttttggcaactcatgagaattgccaatgatcccagcatttgctactcttgatagtaattcccttcatttcctccatttttatacatgacctgcagtaaatattgacagttactttgctggaaagaataacacagagacagcttttcttaagctccaaactgaatttcgtggttaattgattggccagctggccctgccgtctcttgacctctacaagagccagcaagattgatggtttcagcagcctttcatggtgcactaaagcattcagatctatcttttgttatttgggaaacactaagttcttatgtagcacattatttacatggactcaagggctgacgagctgggaggcagcaaatgcccaaatggaagacaatgtatgtagatcaaagaagccgatgagacagagagttcataaaatgtgaatacaattccaggggagaattgatgattatggaagcagaaagccaattgagttaaatattcattccagcaacaagtctgatcgtctcactgggacctgtgcctttccgaagtttcctcagcttttcaaggtctacacaaggaaagaacaaagccatcaaggaggctctcattctggaaagccggctgcaagatggcatgaaccagaggtcagcggccaccactgagagttcatcgtattcgcctctgtaaagaataagcctcaagcagtggttctgcaggagcggttcagcatcatcaataccaatgagccctaatgaatgtgacaattcagaatgattgggccttttcctccaaaacgtttttctcctcaaaagtaaaacaggcttgaaactcatgtcttatatatgctgtttagattttcatatattaatgtcacgaatcagatgataggaaggtatattaacaagtgagacattgggatatggccccttgttcaagagcatcaaagcattaaatatgttgttttaaaaatacctttggcatagttttaccacctatttctcaattgccatcaaaattttaacttttaatgacttttggaagtaggttagatggggtggtgggagaggaatagaggatacagaaagataaaaactaaatccaaaaatagtattgaatgagaattactaataagaattattaattgagtgtcttctcataaaaatagtaatatctgttctttggtctctcacaatacatagtttaactccatatataatttaatgaatgcaatgtgtcactttggttataggtttgcatcttggaaacgatgttagtagaaacaagtcagtttccctctgttcctttttgcttagctttctgggctatcttcaccaatgccacagtccatctgtaacagaatgcattggagatttgaaaaatcacgacagataataaatctctatatacttctcatcctctggaacaattgagacattgaaattgcctgatctttttgagtgagtgttgccactttgacccaggcaaatgagaaataaaacaacaataccaaccagcagtttcaagtatccttctgctgcataataactcagcagtaggctttgctaatggtgtttatgagctgccaggctagaattggcccttaagcagggaggcatttgcccagtgggcttcttccatgtgggggggcctttttgcagcctgggggcccttttaggtgattctcagccggagcggtctcttcaggccaaagacttttgcaatgagctaactatgttcaattattgctttcagatccaccctacattcaaatgttttgggacaccaatgtaataccataaaaatgactgtgtaggacacgcctatgctaatgtcatgactggtttgttttacgtattatttatttatttgatactgttaataaaaagcaaacaagccaaaaagaaatactccccaacgtttaatagagatcattgtatcctaaaatcttatagcacattagagtgcaatgaagctcaatgtaacaagcatcaacaatcaactacgaaatgagtatggaaatagagtatatccaaggaagacagaagtgtagaccacatgatgacagcgggataaagacaaaggagaaggtaatcgagagccaagggttaaaccattcaaattgtcctttggcattaaaatgatccaagatgtttcatgagttcaggttaaaaaaggaaatcagtaaaccccaatatactttaagtttcatttgacgcccacaagctgaaactacctctttgtggtgtgtgtctttacatcagcaaagagtataattgaatttggttattatctccagtgctacctgtttggacctgctatttcaccttcctgaaaactgttgcattgagttctactggggaaaattcttaagataacatctgtttactaagaagggggtgtgcttacctgctctaaggtattgaaatacattgtaaatctatacctaattcatataaacataatttcaaggaaaaacaaaaacataagagacagaccctggcggagtgccaaagaatttgtcagggtcccagtccctgtaccttatgggagaattaaattcattaaactgggccagatgtggtggctcacactggtaatctcagcactttgggaggctgaggcaggtggatcacctgaggtcaggagcttgagaccagcctggccaacatggtgaaaccccatctctactaaaaataaaaaaaattagtcaagcttggtggtaggtgcctgtaatcccagctagtcaggaggctgaggcaggagagtcgcttgaacctgggaggcagaggttgcagtgagccgagatcgtaccactgcactctagcctgggcgacagaatgagactcagtctccaaaaaataaataaataaattcattaaactgaacaaattgagcccaatttatttgtcatagttcaaagaaaaggagagagtagagtaaaggggcttagtgcaaatgtctggtcagatactcaaaggtttagagcctcttaacccttatatttctttacataatttattctcattattttttgtttgttttttgagacagagccctgctctgtcatcagtctggagtacagtggcgcgatctcagctcactgcaatccctgcctcctgggttcaagtgattcccctgcctcagcctcccgagtagctgggactacaggcatgcatcaccatgcccagctaattttttctattttggcagggatagggtttcaccaggttggccaggatggtctcaatctcctgaccttgtgatgtacccaccttggcctcccaaagcgctgggattacaggtgtgagccaccacgcccagcccattcttgtttcttggtaaaggaaaatccaactatatatatcttctttaggatcacttaaagacccatacagatctgtcaaatagacatccaatattttggtaggctttgaaaggaggtgcaaaaggatgagaaggaatttagggagatcattatctgaatcattgaacaaatgctccttaagcacctggtgaagagaggctactgagaagcagagcacgtggtcccagcctacgaggtgacaaagtaaaatggcagaagcaatttgtaatgatctcacctatatgtggaatctaaaaaaaagtcagcctcatggaaacagtagaaaggtgattaccaggtctgggggctaggagagagatagggaaggggaaatgctgtcaaaggatccaaagtttcagttagacagaaaaaataaacttcagtgatctattgcacagcatggtgaccacagttaaaaataatgtatggtacatctccaaattgcttaaaaaaaaaaaaaaggtttcaaatgttgtcaccacagaaaaacaaaaacaaaaacaaaaaaaacaaaaaaaacgaggcaaggtgatggagatgttaattagcttgatttaaccttcctacaatgtatatgtgttagtccgtttttgcgttgctgtaaagaagtatctgaggctaggtaatttgtaaagaaaagtggcttattttggctcatggttctgtagactataaaggtagcgtggtgctagcatctgcttttggtgagggctcagaaagcttccaatcatggcagaaggcaaagggggagcccacatatcagatggtgagagggagcaagagttgagggggaggtgccacgctcttttaaacaaccagatctcatatgaactcagagcaagaactcactcattatcgtgagaacaacaccacgctattcacaagggatccacccccatgaccaaaacacctcccactgggccccacttccaacactgcgggttacatttcaacatgagatttaaaaccatgtcagtatacatacatacattaaaatatgcatcacattgtgccctatacacatataaattattgtttgtcaattaaagaaagaaataattttaaaataaataggccaggcgcagtggctgatgcctataatccaagcactttgggaggccaaggcaggcagattccttgagcccaggagttcaagagcagcctgggcaacatgatgaaatctcatctctaaaaaaatacaaaaattagctgggtatgtggggggtgcacaggtagtcccagctactcaagaggctgaggtggggggattgcttgagcctggcaggcggaggttgcagtgagattgcaccactgcacaccagcctgggtaacccattgagaacctgtcttaataaataaataaataaataaacaaacaaataaaggttgtgttagaacaaaaaagaaaaagagtgacaatgcaagccacatagttgaagttgacattaactagcatgtgccaacgagtgacaaaggaaacaagtgcaaagcaagaaaagttagccattatcatggtccatagataatactctcaaccccggctcttgagtgaagcagtattgtgcagtggttacatttatggacctaatggtcaaactgcatgagttcaaatcccagctttacagctaatggttgcattatcttgggcaagtcatttaacatctctgccttaattgattcacctctaatatagagctgataggagtctgaaatagctgctataaggactaaatacattaatatatagatagcattcataacagtgttttgtggactttccgaaggtgctgggccttccagttgccttaaagaatggattggattagggtggaggagatgaaaaaaggcatcacagtacatcaagtgaatggtgccagtgtaagtagaatacaggaataaggaaatgcccagcttgttggggggttagtatgaagacctctaactgggactgaaagttctagcaacagtaaaataccctggcctccaactactaagtaccctgaatactaagatgagtttatttttcattctatagacaatttccatctctttctttcaaaacaaacaaatgatgacgctgtatgagtaacagaagatgactgggaacagaaccgtgaacagaattaagcacctgcaatcaaataaaattcacagaaaacttaatttaccacattagtgatatgcataatcgttgttgtgctggtaaccagctcttcaggaaaaaaaaaagaaaattcctgatttgttaaaatactgtcactatggcccactgaaactatcaaaatgaggcatataacaggaaattgggaggagagttatacaatcagctcttgctagaaaatgatgatcattgacattacccttatggaaccaatccaaatttgggggttgttttctttctttctacttttgtgtgtgtgtgtgtgtgtgtgtgtgttctctggtatctgtaaataacatccatatcagtttctccatccattctttgcacatcactggtaatgcctgagatcaaatctgccatgcttttccgggcagatccaggctgggatctcagtatccctgcttccctgaagctgtccaacctcactcccttcattgctctgctgtgattaggaaggagccattccaaggactatggggtgctctgtgggataagcccagtccttcttccatacaggaggaacaggggacgggtgctgacaagaggaaatgcatggagcagagagagggaacaggcagatggactcaaggtccccagactctttcgagtgttgaatcagaaggactggagctgtgggggaagagggtgggaacagggtagtggaataacatgcagacagatgggctgaactgaaggtccagaggcactcccagccgtcaaccagcagttcttacaccaggttgatgttagggaacaaccccagctttaaaacttatttataccaaagtgccaaatgactcatttgagacaaggctttgatctctggggacagggcgttagacagcatgaggcttaggttgccaggtgtcttcccacagttcctgtcttgtgtatgttacacactcaattcatgtcaggatgacactacattggcatgatccaagggaacccataactgacatgaatatgtgtgtgtgtgttgattggggagatgggaaagagaacatttcttccagattttctagttcttatagttcataatcttaatcctcatctccacttctctgccacttctctggctaaatccaaagcacagcctggctagagaggacttctcttccttgggggttctagtctattctctgagttgtgacaaacatttccattccctgtaattacccacttgccttgtctctgaagaggcattcacagaataaaccaaaagaattgtagtgttaggaagatgtcaaatcatttgacctctactccatctccggcttttccttctccccccatgaaagttatgcatttagttgcctcttgttcattagtctggacttagagcaaagtgactacttcaacttcttgtgctcaacatatgccacagttgcttacatgtgataagtccatttgtcacttgataagcctttgctagaatttccttctctccatctccaaccttataatgatcttgaaggcaatgtcggaggctaggtaagtcttctttgtgttccccacttgagcataggtgagctgtcatgtcaatttccttacactactgagaagaggggatgtgggtgggcagggacccccagaaacaactttacccctttcacagtttccatcactgcctccaatgtccaccgacgttagaaagtttgggcagaagtggccaggtgcggtggctcacgcctgtaatcccagcactttggggggccgaggcgggcagatcacaagctcaggagatcgagaccatcctggctaacatggtgaaaacccgtctctactaaaaatacaaaaattagccaggcgtggtgtcaggcgcctgcagtcccagctactagggaggctgaggcagaagaatggcatgaacccaggaggcggagcttgcagtgagccaagatcgcaccactgcactccagcctgggcgacagagcaagactccgtatcaaaaaaaaaaaaaagaaagtttgggcaaaacctagagtttcagggaaagtcatttgaggtttggtttaggcaggaaatagaacaaaaccagtgtactaaggagaatacagtggaaataagagggaaaggaatgaagaaactggtaggctactaaaatgcccaggtacaaactactgaacatccacctttatgctgtcagtgggcagaaaaagaaatagacaatgacaagatacattttgaattagtgtgatttaaggactggctgatgtgcacaaaacatgagagaagggagtcaactttgacagagatttcaagagcagatcactgatgaaatgtgataacattcagaaaatagagaagttgacatgggctttgatgaaaacacaatgagttcagtttgaagcattttgaagtcaaggtgattttgtgaaatacaaacgatgctgtccagcaggcatagaatctatctggagtcatttgtacaatatacctatgccttttttttttctttctcctactgtagacttagataggaactcacttttgtcttttttctgctaggccaataaatacgttctcagcttagaaaaggggctttttggtttgcctatttctgtttctttttacagaagttaacacatttatttgtgacctattaaaatcatgaagtattaccactgggttttatgttttaatggaaacatttcatgtttagagaataatgatgcttaaaatttatatgaattaaaattttagcctgtaaaaagagcctggaaatatcttcataccatcatctatccttccacttaaatattaatcacaaagaagatcaggcgtagtgaacatacaccacgcaacctcccattcagagaattcttgtgcaaagaaggattccaaagggtttcagaaatactaaacttcttgaaattgaaattgaaattgaaatccttcttggcttctctacctgttacttcctctgcagtgctcagtatagtgtctgctctccctcctttctttttctttttttttgagacagattttcactcttgttgcctaggctggagtgtaatggcgcaatcttggctcaccgcaacctctgcctcttgggttcaagcgatactcctgcctcagcctcccaaggagctgggattatagtaccacgcccagctaattttgtcttttcagtagagatggggtttctccatgttggtcaggctggtctccaactcctgacctctggtgatcctccctcctcggcctcccaaagtgctgggattactggcgtgagccacacacccggtctgctctccctcctttcttcacttttctgcttcctctctcatattaataataagcttctatctttccttaattgtttacatatctgtctgtcctctttctccaccccacgaactcctcaaaggcagagtccctgtcttttttatttcatatccctaatggtagctgcaaagcagacactcaagaaggaaggaaggaagtaggtgggagaaaggaagaagaaaggaaaatgaaattaactactagtttgtttccctgtttcattgagaacacacgtattaaccaaacaagtaaacaattgtcagaatattgcattttaaactcctgagagaagttgctgcttctgtggcatttctatctaattaagtttccccttaaagttgtaatcttttctttcaaatctcataatacgtcttatttaggtgatcataccaattatatctttcccactcaaacccctaaagttatccttgaataaatgagccttgcaaattatatttccccaatttgcacttatttctttcttttttttcttttttctttgagacagagtttcactcttattgcccaggttggagtgcaatggagtgatctcagctcactgcaacctccgcctcctgggtttaagcaattctcctgcctcagcctcccaagtagctgggattacaggcgctccccccctccccatgcctggctaattttttatatttttagtagacagggttttgccgtgttggccaggctggtctcaaactcctgacctcaagggatctgcccacttcggcctcccaaagtgctgggattacagatgtgagccaccgcacccagcctcagaatttcttactgaataatccttttatagtttgttataactaacacaaaacagtagtgggagttcttattcagatagctaacaaattccaggcacctcctgtactataagtgtccctcatagcacaaaggggaaagctgccctttaagaatccataaatgcaatgaaactctacttacgccacccaggttgttaggacacaggaatattaatctggagaagcctttgataatagaatatagtcaaagttgacattgtgctagaatatttgaattttttattttccagaaattattttcactctttgctacatttactgtttgacctcaaaagaatgtaaaagcaagtttttaaatacaccattatttcctcaagaggctacagaattgctggatttttttttttttttggaatggagtcttgctctgccacccaggctggagtgcagtggcatgaccttggcacactgcaacctccacctcctgggttcaagcagttctcttacctcagcctcctgagtagctgagattacaggtgtgtgctcccatgcctggctaatttttgtatttttagtagaggtggggtttcgccatgttggccaggctggtctcaaattcctgacctcaagcaattcacttgccacagcctcccaaagtgctgggactacatgtgtgagccactgtgcccaacccagaattgctggaacttaatgccaactctcaattgtctttccttctgctagatctagttaatagcaggtgtctgatacatgttactgaagtgaatatgaaaaatccagagtaagcaaataaatcatatttttttaattaaaaacatataaagtacatttttgtcaaatgaacctaattggcaaagcaaaatctcatcttttaaatttctgagtttccactattgataaaaaaaaaaaaaataacgtaaaacagtgttggattttcaaactcaaaagaaagaaaaaaaccacaaaaaacaaaaaaagcagaagttgggtaaaaacgagttctgactaaaagctgcaatactgtctcaaatgtgcccatgaccccacctattgctcaatttctacaccatgagggtaaagggaaacgaaatgcaacttggattcacttgacttcttaagtcttacagagagagaaactgatcagaaaagatacatttttggaggttggtttttttttttaattcttgcttgtaaggcagggcttggtgactcctggtctcctccaatagcctaattttcctcccaaaagtaagcttttgattccactagggtgggcaagtatctttgtactctgccatttcagagataagagccaactgattttagaaatccaagagcaaatgaaatgtgcaacattttactcttggattgcttgagaccgcatctgtatgcctattccctggagtgcagactgtcttgtgagcatttggtgccactgaactctgaaaatcagggcatgcagcatctgctggggaacacaatctggtttctgtggatcagaagcatttctctacacgttagagtcttaaggatttttaaagagagcaggtctactcaggcaactcgttaccgtccctttcaaccggagtcagaactaagaatgctcagcagatggttgtggagtgaggtaaatttacatgcagccttcagtcattagtgacagatctattttaaagggacgaggttgtgcaacaagggtacaaaggcagctcatggttctaattgttgggctccattagaaggggtctttctggagactgtggtttcttagagcaccgcagtctacccctgaatgaaaggcatcctgctggctaattaacttgcagcactttcttctctattgtgccttgattttttgttttgtttggttttaatctcagaccttgtttctagtaggactgatggagtcttccattatttcgcctaaatattttatgaagaacagagtttccaatcactcactcactctgatttcattacttttagcatacttttcgttcttataatctgcaataaagaggaagactattaagattcaagcttgtttgagcaagtacactgccagagcaaaatcagaggaattcatggaagactgggaaggtgcaagtaatctttctcttagaattgtgatggtaacatatgaaataaaatgtgggagcaaatgaagccattgaaaagagaggccattatacttctgaccacttgggaaataccccccaaaatagctgaaaggtcccaagaggctgggcacagtggctcacatctgtaatcctagcactttgagaggccaaggcaggcagatcacttgagcccaggagtcagagaccagcttgggcaacatggcaaaaccccatctctacccaaacaaacaaacaaacaaacaaacaaactagccaggcatggtggcaactgcttgtagtctagctacagcttccatgaattgttcagtgatgctctcttaactccatgatctatggaacaggcaggcagaaatggagagacagtgggtggaggggaggagcctcagatggcacagaaatctgtagcatctagatcagagtgacacctcagagtttcgagtaacgacaggcacctggcccatggctgggattgttaccagtggtgaatctgtgcaggtctgcagcaacctcaattcttccctctttaggataaaaacttcattgaggggcataaagcagaagagactgaagcaagttttagagagggagtgaaagtttattaaaaagctttagagcaggaatgaaaagaaagtaaaatacacttggaagagggccaagcagacatcttggaggtcaagcacagggatttgaccttctgacttgggggtgtatatgctggcctatttccagcacttcacatcccttttcccttgattcttcctttaggatgggctgccgcatgtgtggtggcctgctagtgcttgggaagtgagcatgcgcagtgtgtttactggcgttgtacacatgctcacctgaggcgttcttcgggtgaatgcccccagaaagtcatgtaccagttaaactctgccatttggcctcttagtgcatatgtgtgagccccctgcccaactcctgggaccttatcgggaagctgataatcaccagtttcagatttttcctatttataaaaagactgcctttccctggagctggctgcaaccaattattttagagagacagttaccaaccacctgttcatcacttgatggtggcctgacattcctggttagggcggggggcactgtcctgctctgctcatgtctgcctacctactgtagcaggaccacaggcagacttttcttaaggagactcccagctttcttcctggtgaaggacccagagtttgtgagcccaggactgcagataatcaaaaatattaaattatggaagctaaatatttaaaataataactcataatggctctccaaatgtctgtaaaagcatttcacttaacaatagctggcaaatattatgtcagtggaaaatacagccaagttttggctcatccaaaatgttgtcatcaccgccactttaatatttaagagattaatgtttcaaggctcttccagaacattgtatttggagtctgattgaaagactcctcggtcctccctcattattctttatgtgtgactttggatgctctcaatacacttaaattgtatgtccctgtggggaatggttctcaaagtgtagtatctggagcagcagtatcagcttcacctgggaacttgttaaaaacataaattcttgcagctggatgtggtggcacatgcctataatcccaatgggagaccaaggtaggaggatatcttgagcttaggagtttgagactagcctgagcaacatagtgagaccccatctctataaaaaataaacaaaattagctggacacagtggtgtatgcctgtagttctagctacaggggagtctgaggtaggaggattgcttgaacccaggagttcaaggctgcagtgaactgatatcgcgccactgcactccagtctgagtgacagaacgagactctgtctcaaaaaaaaaaaaactgggggccacacaacagacatactgaatcagaagcctgggggtgtagctcagcttgtattttaacaaggcctccatgcaattctgatgtgccctccagttttagaattgatgctctgtgcaaatgaacaggtactggggcataatgatatgcaggactgttcttgagccaggctttgtattcatgaagtgggtgatagttgattggcattgtttcagtactcagtagctatgaagcattctattggtatcattggtattaaatatggagcagaagcataactcatctccctcatggccacatgaagaaagatcagtatgttagagctgaaggacacctaaagccccaaacaactgccagagaccaaaatcatttgtctcaagaaatgttaacaccctttttgtgttcaagttttattatttctttactaaaattgcccattcacccctttgttttatttttcacacctaaaaaagtagccaagtttgaaaaagaaagagtgcttgccaccctttctgtccttaaagtgaaggccttgtctatctcattctgatctctgcccatccatcaccattcagcactcctgttgtgacttcgccccatctccaatcttacattttattttcttggtacttttggtcatggctgtgttgatggtttcagaagaatacatagtatattaaggggtaacgtttacaaatgttcttgagagaactaatttttcccccttcatctcaaggtgtcactgcttaattattacggttcctaaataatctctatgatgtggttaactatccctaccttgcagaaatcctggaagatgagacggacctagcatgttgtgtgagcaacatctcttagagataatcaatttgatatcagcacaattattgtggctactattgaaatttctcttagtttcttagattagtactattggaactaatcgtaaataaccaatttacaagaaaatgagtctcattatattatagcacgaagaggatatattcaaggagatacacctttgaatctattatttcaatatgcttataaaaattactattttaataaatttcccagtcaatcctattgtgtagaaaaagatgcttcactgcttacatattttaagatgagactgggaacaagcagattaatttggttgtgagactgggagtttatgagcaaaatgttcttctgtgcaaacgaagtagaagcttcatttcccttcccttcagttaaccctatgttattggatacgtaccaggtactagagattctctccctgggtagtctggcttagaatggctccccaggctctagccatctgcatagctgctagaggaaaaagctgttttagttggctccaagaatgtctctgggaattataatgtattcatagaaatgagtgtggagtgcccacttgcacaatggaagatccacaataatacacctggatctgatagcaccttcctgaacttgggccacttccctctttgaggtttgtgaggccaaagggatatacacagaggctgcctttgtttgtgattacctgggaattagatggggtatcattcccccttatatccttttactatagcttgttcacttttgaaaaggtggaaaactagactaaattctgtattgaaaatgtcaagtcaaatatgctatataaccaagaaatatcagtatagaatatcatgtattctacacaaagctacattttcaatataatccccgtaattatttcactcatcaaagaaatgtatccagctgagacataaaaccttagtcaatacattaagaaaaaaagaaaaaaaaaaacatttttttcccagtcatggggaccagattgtgtctattattcatcagggcctagcacaatgttgagcacatgctcaaggtggccaataaatccttgtggaattgagttatatgggagtcaattattcggtcacagcactggattaggaggttgagttcttgatagatttactttcagctgacctgtgtgacatttggtatttggttttgcaactttgttttcagttttttccatgcaccaatactcctagaattttgcttttgcctcttttcttccctttcatcttttttttttttctgtagaaagcatacatccatatagaagacctctctcaatacattccagatctgagttgcagtgcagcacttagcttagcttgtgaaacactccaaagacttgattaatatcatcctatggagagatgtccttaagtaacttagaatggatcctttatttttccagtaaataaactctaaaatatgaggatttccaaggtgaaaagaaagagtacgaacccaagaaatattttaaatgaatcttgttttccgtccctgtgttctgagtaacatctgtattcacccctgcctttccattgattggaaacctttagtattctttgtactctcacagtcctagtttctcagaactgtctgtcccagtctaggcagttgtttcattaaacaaatgttattaaacaaataattttgagtgtgtgtctggtggggaggggaggctggggggttaaattcatgtatttttaggcaagagtattaacaagaattgtttgaaatatttctgaaaccatagtgtcataatgaaaataaaaataaggtggagactggattgtaattaacacagagcttttccatccaagacagagcttaaaggcctctgtttgttgggtcactttaaaaacaaaccctactgccagggatttccaatggcaactttaccgtgcttacccaaatggaggtaattaacaacccttctgtgtgttaaattaggtatccacagaattgggaagcttcagatatttattgtaaaccagagcctcttttcttgttaatctcctaagacagcagactagtgactcgcacccattagaacaaatgaactaagaaactgaatgacaggttctgaggcccctaagaagaaaaaacagagtctggattagagctgcttaacagaccactcactggggcatgctccctccccacgcccatttcctatcccagaaaataacaaacttcagatgacccgccaaaaacgactaccttttatatttgtcgttgaattatttcttctttgtttaaaattaaataatgcaagtgatttttttgctttagaaaggaggattacctcttcctagacatccagttgaaaaaccaactggtatagaagggaaatgcatctcaaacagatacaatgacattcttataattgcctcatttgaaatggcagcatttccccgtgctaattgtcatccttcagctaatttggtacattaaaggagattgttattaaaaacaaaattaaatccattgccagcatctttattctctaccagaagaaaaattttaaataaatgcaaatacgccagttttgctcttaatgttgcctgaagttgaaaggatgaactttgacttgaaagataatgagttccccctgttggaggatttgaggtttgggttggataatcccagatgatgttggaatagacagaatttaaggttccttctaaccctgaaattctatggttataaaatctatccttttcttgaaagaagaaatattaaaggtgttttcaaggaaatggtagcataatgaaaaaggaaacacaaaaatgatttttttttccttaataagcagtcacctcacttggtaatagtttttcttcttaattgcttgtttgtttgtaacaaatgcggtggtgtaatcaagtggcttttacaataataaaacacttctctcaattaaactgtactgcaaggaattcaaagatgaacagaagtgttccttcttttaagatgctgatttataagcatccctttaaaatttacttctctttctgatgataaaagtaatacatgtttattgtagaacatttggaaactaccagggactataaataacccatagttgccccaccagagaatattcttaatatttttggcatatttcttccatatatctattcatattcacattcatactaatttgtcatattctaatttaaccctctctttaatgtttataatgtgattatactactttttaacacatgaattgtctccaaataaaagccaaagtgatccatttgttaattttttttaatcctacccagctgaaatggacaaagaggagcccatctcactcgggggaggggatcaaagagttatcctttctcttgatcaattctgtagcaatcagccatgataagaagcccaaattaccaaattaacaaaaagaattttatttagtggccatatataaaagctaaatggacagttggagacagacaacaaaaactaatataaaactaaaaatgtgaaaattcagcatttaatgaaaatgagagcttagaaaaactagcatccagatttattcagactgaatttctgccctgggaaattaatgaatcatccttcagttcccttttgtgtctgtgcatccagcctcattgtccttggtagtaaattatgtacaccccctgtttccaaatcttcaaatacggtatgcgtcataaagtcacaaaatgtgtaatttgggtcctgtatacaaattctagccagggaatggcttgtagtcatgctaaatattctttacaagttgtgtaacaaagacaaagaaaactacaaaaaaatacagagaaacataaaaaatttcccattccttctgtgattctgatgtatttccctttgattctttgcttctacattgaaatagacttagtgggtaatactaataattacagttaacagtgaccaggtgatatggtttgactaggtccccacccaaaatctcatcttgaactgtagctcccataattcgcacgtcatgggagggatcccgtcggaggtaattgaatcatgggggaaggtctttcctgtactgttcttgtgatagtcaataagtctcacgagatctggtggttttataaaggggagttcccctgcacatgctgtcttgcctgccaccatgtaagacgtgactttgttcctcttttgccttccaccatgattgtgaggcttccccagccatgtggaactgtgagtccattaaacctctttctttataaattactcagtcttgggtatgtctttgttgttgttgttgttttgagacagagtttcactcttgttgcccaggctgaagtgcagtggtgtgatctcggctcactgaaacctctgcctcccaggttgaagggattctcctgcctcaccctcccgagcagctgggattacaggcgctcgccaccacgcccagctaatttttatatttttagtagagatggggtttcgccacgttggccaggctggtctcgaaccctgacttcaggtgatccacccgcttcagcctcccaaagtgttgggattacaggagtgagccactgtgcccagcctgtttggttttgtttttgttattgtttgtttgtttggagtatgtctttattagcagtgtgagaacaaactaatacatcagaagttctgattttcatatcagcacagagaaaagtgaccttcccagtccagtctatcgtattctcaaattactttctctaacttgtgaaataagatcttcttggtgaactttatcagacatttctgaacagaattaccactctgtggtggcctgggtaaatgtaatatatttataataatttgaaaagattcctccaggacttttacaaagacagatgatattaaactgaacaaatagtgctaggtaagaagtaaattgttcaattttttcacagaagccctgtagattttagcaaaaccccccagacacaatgtcaaatttctcagcaggtttcttggttttagctcttccccttaagcagtagttaacagaatattagatgttagtaaagttatttctttgttattctacctgggttgactaccagagaaaatccctgaacattttacaaattgctcaacagattttcatctaaaactagaaaagattggccagttatggtggctcacgcaggaacattgctttagcccaggagctgaaaaccagcctgggcaatagagtgggacccccatttctaaaaaataatatcttttaaaaaattaactgggcatggcggtgcgtgcctgtagtctcacctacttgggaaactaaggagggaggattgcttaagcccaggatgtcaagattgcggtgagctatgattgagccactgcactccagcctggaggacagagtaagaccctgtctcaaaataaaataaaataaaattagaaaggataggtgtgtttgggagggagactggttaaccagggtgcatgggattatgtagggcttgtctttcatttgagttcttctctgtctttttaaaatgactgattatatatattaggtcccaatggcttcattatcactattattttaattcataggttaaattttataaacatgaaaaataattgacaagcctagaatctcttttctgtctatattagaaattaaattatatttagtatttaagcaatacatgcatacatctcatgtaatccttactgtaattaaggatgaaattatgtaacataggaaaagcagatgtaagttctcattctccttttacacataaggaaattaattcagacttttagtaagttgcccagaatcacgcagctagtaagattcagaactaaaaatataatacctgtcttctaattcaaatgtttcacatccaagtgcccatatactaataatttttaactcttttgttggggttaaatgagataaaattgagtcttattgtatagaatttatcagaaatagcaaaatttcgcccaggcacggtggctcacgcctgtaatcccagaactttgggaggccgaggcaggtggatcatctgaggtcaggagttcgagaccagcctggccaacatggtgaaaacccgtctctgctaaaaatacaaaaattagctgggcatggtggcaggcacctgtaatcccagctacttgggaggctgaggcaggagaatcacttgaacctgggaggcgggggttgcagtgagccaagactgtgtcattgcactccagcctgggcgacagagagagattttgtatcaaaaaaaaaaaaaaaaaaggaaaatctctaaaatgatacctaaaatgataaacaatttaaatttagcataattatcattttttaacttacagattgacatatttctgcaagtgttttcagaggcattggggccacagaagtccaagtcaaggcaatttttggtactaaacagttgacttttctctggtccacatcaaagctgccactgtgcagagaactaacatgtgtacgtgactagtctagggctggaggaacatgcgaggggactgttggaaaggaaaaacttttgctcttcctctaggttcagtaaattagggactgtaaacaataataatgaaagattaataagaggcacacaattttattttattttattttatttacttatttttttgagacagagtttcactcttgttgcccaagctggggtgcaatggcacgatctcggctcaccacaacctccccttcccgggttcaagtgattctcctgtctcagcctaccaagtagctgggattacagacatgcatgaccatgcccggctaattttgtagttttagtagagactgggtttctccatgttggtcagcctagtctcgaactcctgacctcaggtcatccactcacctcggcctcccaaagtactgggattacaggtgtgagccactgtgcccggccccacaattttattaatatttatatgcaaaagagcttgtagaaaatcagtgaaaatcaaagaagtggttagactagggggtttataaacccttcttaaccaaggaaagagggtttgggcatcaatgagtggcgaattgtggagaagtgactagaaaatgtatgagagaaactaatggaaggtatattagttcattctcaagctgctataaggacatgcccaagactgggtaatttataaatgaaaaaggtttgactcacagttctgcagggcgtggaggcctcaggaaacttacaatcatggcagaaggagaagcaaacacatccttcttcacatggcggctgcaaggagaagtgctgagcaaaaaggggaaaagccccttataaaaccatcagatcctgtgagaactcactcactatcgtgagaactcacttactatcatgagaacagcatgagggtaacagcccccatcgttcaattacctccgaccaggtcccttccatgacacatggggattatggggactacaattcaagatgagatttgggtggggacacagccaaaccatatcagaaggtaaggcctattttagtaagttttgtttatgcaaactcatctcagtgttgactccctatctttataacatgggtcacttttttcttcctgatggtgtgggggagagggcacctatctcaaagagaaattttgctctgcttttagatgtacaagggaaagacagagaactgttcctgcatccattgattatcaattgccttcagctcaaaataatccttatgccaaagtagcatattttggggtggcatatttcaacctccttcatctctacccagctggaactgtccagggagttgcatacctcaaaagctgagttggtggctataaagacaagatttgggttagttcctgagaggtaagagacctgcaaagggaaagaacatagatcagaacgagaataaataagcagaaaagagcaaatctcagcacattcccactgatctcactaaaccaggctcctagtactggaaataggtcagtcaacttcaacaattgtatctcatttcaggaagcagcatgcaggtgggagtggggcacccctctgaagtttggcctttatgctatgtgaataatcacacacttaaagagaggcatttctatgaaaacaaaagaaaaacaaagattaacagttggagcagactctaaagccagtttttgagtccagaaggcagttagttggcaagatttctaaatgttggattcaaggctgggtgcggtagctgacatctataatcccaacattttgggaggctcaagtgggagaattgctcgaggccaggagttcaagataaacccgggcaacacagtgtgactccatctctaataaagtcatccaaatgtagttgtatgcacctgtggtaccaactactcaggaggctgaggtggacggattgcttgagcccaggaggtctaggctgcagtgagccatgatcacaccactgccctccagcctgggcgacagagtgagatcctgtcttaaaaataaataaataaataaataaatgttggatgaagtgtctttagatggtggattgaggataacaggggcagtctcagtcacgtgcatttcccggagtttgaaggaacatgttctggtgagcttcctgagtggtccaaactacggtagtgataattcctttgaagttaggttcagttgtccaacttcagcttccagggctccaagaaaagggcaattgtggttctcagtgatgccaagtcacaagggtgagagaagactggaaacattaattacaagatggcaggattcagtttataaaggggggaaatatctcaatgataatgaacattcacaagggtgggttatagttttccattaaaacataaaatttctttctacaatcacccccaatgtgatcaaaaacaatcaaagtatgtctgcttgtgtctggcaactgagtctagtctcattaaacttggccagattatttacataataagtgcagcaagaatagtaatttagcacgtaggcttttttgtgtttgctcttctggaacttttaataaggactctcagaatagacttttaaaagctcttgagagtagtaagccaagccaagaactagccattagactttatctgtaatacctatagattggggtgaatttcccttttcttgaggactctaaaacattctgagtttcccgggcctgccagaaagttaccttccttacccacctgtaaggctaggaacgctataaaccagatacgagtcttacttttccaagggagctttgtaagcgttggtgccatatagtcaaccttagttccttaaaactattgggttatatgtgattccacacacattattttcaaacatgacactgcagtcaaagccttagtaggacagccaatgtttccaattgtgttctgttccaaggagaatagattcttatggaacttaggcaaataactatattgccatgaaaattgaaatactcaataagcatttctgaattttggagagatcaggtaggggcaaaagataaatatttcatttttgtttatgaagacataatctattaaattattgtgaattacaggtagcttttagaaagggtttcctgacatccagaagatagaacattaaataaccagcaaggtttcaatcaaaaaggccataaaaattataattgttttttatcagttcattcagtcccatgtaattaattcttgttttgcttgatcttagattagtggatttatgaatccatcagcttctccattagttctggaaatccttactgtgtccagtgttataatcttgaagttatttaagcaatgtcagcagaagcctgtactccagagtacctgccaaggttttgttcatgaatctctaatatgctctttctttgctgaagatgaggcatgctggcctacagctgactgcgtgagccttcagaaaagcatcggcataaaacaataattatctgtgaatgacaatgacttaaaatggccatacctaaagatctgatgaaagttcattataagtcaattgataaagaaatttggttgtttctctgacatacaggattttaagataataatgtgataccaagacatctcatgaacagcaagggcattgacagatttctaggaattttatatgatttctgaaaaatcaaaatcattatatccatacaaatataacccaggaatggttaaatatcttctctttatttgacagtgcttcccatgcaatttagcatattaaataagctcatctctctttttacaaactgagagaacaaatcctttgagagttttccaggggccctctgggaaattccagagtcaattcaaggtcaagaagacttcatttggaatttgatttagggaagttgtgaaaaacgtgaaaaggtttgaacaattgattaaatgggatcacagatcactataaaacaatacttagttatctatttaaccaaagtgacaataaaagattttcaagataaatatggaagataacataatcataaaaaattttaactctttcaatcttaagaaaacttggttttctgaaataatcaaagacataataagtgcaacataaagcacagaatatttattttctaggtgtatcactcaagaggtaaagaaaacatttcataatctcttaccaagaatagactactcggtatagtggctgaggcctgtaattccagtcctttaggaggctaaggtgggaggattgcttgaggccaggagttcaagaccagcctaggcaatatagtgagaccctgtctctctaagaacaaaaaatagattaataaaccaagaaaacttgctcattttaaaagtagttttgcatcaatacactactgtattagtccattcttgcattgctgtaaagaaatacctgagattgggtaatttacaaagaaaagaggttgactcacagctctgtaggctatacaagaagcatagcagcttctgcttcttgggaggcatcgggaagcctccaatcatggcagaaggtgaaggtggagtaggcgtcttacatggcaggagcaggagcaacagagggtaaggggtcaggtgccacacaattttaaatgaccagatcttacgagaactcggtcactatcatgagtacagtaccaagagggatggtgctaaaacgttcttgagaaatctgcccccatgattacaatcacctcccaccagagcccacctccaacactggggattacatttcaacatgtgatttggtggggacacacatttaacccatatcaactactaagctcattctttaaaaccttataaatacacccattcagtcctagccagcgtggccacacaatgtaagattctctctctcttctgttctctctctctctctttcactgacctttacaactttctatatcaactcacatttttgtcctttattttcgtctttcttatttaaatgacctctaaactactctaggataaaagtcactgtcatttttctttaacaaaaacacatctcactctccttgtactctttgcctgcagagttttgtttcttcatcctattattactagtagttcatttacacatatttattagatttcttaacccttagtaacattaactttcagtgaaaatgaagaaataaacaatcataaactgtcagttacatacatgcattctgtgctacattagcacaggtataaatacattctctcataatttctagaggcatgtttcctaacagtacaacttctcagtgtggcaaaagagcaggtttattaacagatccaaatacctttagtctctgccaaattaagaagtcaaaagtagccgggcgcagtggctcacgcctgtaatcccagcacttcgggaggctgagatgggcggatcatgaggtcaggagatggagaccatcctggctaacacaatgaaaccccatctctactaaaaatacaaaaaaaattagctgggcatggtggcgggcgcctgtagtcccagctactcaggaggctgaggcagaagaatggcgtgaaccagggaggcggagcttgcagtaagccgagatggtgccactgcactccagcctgggctacagagcgagactctgtctcagaaaaaaaaaaaaaaaaaaaaaaaaaaaaggaaataaacttaaatagataaactttagtaattagtattttggtattttattttctttgaaattatctacctatttcatgaatatccgtcatttaacttagtataactttaagatttcaagtaaccaaaaagatgtcggaaactatttttaagtcactgtactataaaacagttattgttgaaataaagtttgtcagagtaatgactcaatctgaataaaatgccatctataagtttaatagccttaaacctcagtagttataatgttagtttgactagtaagtccaagtagaataaaatgtatatttcatgttgacaacttgaagacgtaactctctttaattaaagaaataatattaaactggtagtagcggtgaatccatacgggtatgcagcatccttacatcttgcctccttagaagaaagagttcagctgacggacatacgcagagtgagagaccgaggcaagttttagagcaggaatgaaaggaagtaaagtggaagatggccaagcaggcgacttgagagatcaggtgcaccgtttgaccttctgacttggggttttatacgctggcatgcttctggggtcttgcattccttctcgcctgattctttccttggggtgggctgtccacatgctcagtggcttgccagcacttcaaagggtccgcatgcacagtgtgtttactggacgtgtacgcatgcccacttgaggtattttttcccttagcaaatccagtgttcctagaggaaggtcatccgccattttgccttttagtgccatgcttgagcccacttacccaactcctgcgatcttagccggaagctgctgatcagcagtttcaggctcttcctatctgttgggagcctgcctttccctggtgccagctgcaaccaattattattttagagagacagttaaggactgcctgtccatcacctgatggtcgtctgacattcctggttgtggggaaagggaaccctctcctgccctgctcatgtctgactagctacctgctgtaacaaaactagttttatttaccaaagattatcttatatcagataaacttgaaaacatgttggttatatttaaccattaaataatatatttggttatatttctgagtgttttagcaatacttataagcgtttttttaagccaacttagaatagaactcatttattaatttggtaataccatcatgaagtgaggaaatgtcacataggtacaacgtacatacatatatacacacataaacatataaagatttatttattttaaaatttaatttatttaaagacagaaacagatagagattattttaagattttagccacaggtcaggtataaatatagaaacacaaaactcacaaatttatatgagctggcatttttgtctttttaaaaaaatctgaattgtatttctggcagatggaacaagaggttacctgctcaatgagggttaaggctttttatcaatattgttggtggagacttaaaaaatttttttcttgacataataatttaatgtagacagtagcattagtctcaggttattgttttagtcaacagaaattaaagccaggtgacttttgggctggaaatcaaagttattaatatttccttaggtgtttacatatcaaagagatggccctcaggtccttgagaagacagttttgggtggtagaatattttacagctgaaggaggaagagaaaggatgtaaactttcaagtagtccctttaaaagggagttttcgggcatttttgtctgttacagggttgctgcgtatcattgttgttattatcaattgttattttctgggacaaacagtaaattcttctggtagcactaagctttatcaagcaggcattttaaaagtggggttggggggatgatttttgatgggtgtgaattttaagttcttgtctaaatctaatttatgcttgttaattttgttaagggagctatccagtctaaccatgatacacttgtttccttctttcaacttgatcctcccataggtagcaatacgatgtttatttagggtgagagctctctaaatatccttttaaacataaaagctttttcaaatcccagttccatcatctggtctttgacaatttaggatctccaaaggtatacgtgctccaaaatgtgacacaaaaccagtaagacttttatgactcaaaaccaatcatccattttatggtttaaccggggaccaagagttgtccccagagagggtgcagaagactctgccctcatgatggaaagtcattcccaaaaatagccaaagagaaagcgagctgagaccctcatggtcacaggcagcaaaaatggtgtttgtgaaaatggtatctccagcgttacacaaaagtgaggcacctgcaatcacagacttgtggacctgtgacacttgggaggcaatacggagatgggactttttcagcactaataagacaatgaggaaggacaacaagtgccttgtatgagctgagacactttatttagacaaattccccagattgctgacatagccaggtgggaaattttgctagtgttttttagggtccttgactgacagcgagcacctccagactcaggcccaaccacctgtgcttcccagtgggcaaaaacacagacagaggtgaggcgtggtggctcaagcctataatcccagcactttgggaggctgaggcaggaggatcacttgaggccaggagttggagaccatactgggcaagatagcaagaccctgtctctaaaaaaaatttaaaaattacctggacatggtggtgtacatctgtagtctcagctacatgaaggctgaggcaggatgattgtttgaccctgggagtttgaagttacagtagctatggtcgcaacactgcgctccagcctgggcaagaccttgtctctttaaaaaagaaagaaagaaaaaacaaaacaaaacaaacagagcatgctgttactagatctaagtcaagttctcgggacagaagggaggacttcatcgaatttcttttttattggggacccacaacaacatttgcccaaagggtctgtagtctgctgagaactttaaagtcaccagtctgtgaggctggctcaaacaacaggcttatacacctgtgccaatattctattctatgattttcctccttatgacaaacaacacaaaagacagagacaaagagaaaacaatggctgtctccaggaggaaaaggattaatcacaaaagtcctcaagccaaaaatcacaaaagtcgcaatacccaaagaattatttcttacaaatgttttctcctgccaatctaaatttggagaggaaaagacaaggaaatgctcatactgcactccctcaaccaggctctctgcagaaatcttggggggtatgtggggggatctttttgactgggcatggtggctcacacctgtaatcccagcactttgggaggctgatgcgggaggatcacttgagtccagaagttcgaggctgcaatgagctgtgattgcaccaccgcactctagcctgggcaacagagtgagaccctgcctctaaaaaaaataagataaaaaaagcagtttttcaagggtgtacaatctcctacagcattctatctattctttgattaattaccctcaacccatttagccattaatttattgaacaatgtattagacatccacttcgttccaaagactctactttagggttgaaaaaaacctaggggtgaacctggcatggtttttgccctcaaaattcttaccctatgatgggagagagggaagatatgttcatgattaagctctaagtcagaatggtgaaaaaaatcctttatagaagtacaaagatggagcatgcctcttactaaatagttgtaagagcgagcaagagttactaaagcacttcaggttaaggggaggcagagggtaaggcaggttagtgatagggtacttgtaaaatctccaaagcatgaaaaattttctaatgttttgaagtagcagaatataaagtttgtaggagacaatgtccaaagaagagactgaaatggtagtttgaagccagtctgtgaatccattgaatggaacacttcacagtttagttgcctcttcttgattacagagacttacagaggcatttcaactggaaagtgtttgatctgctttgttcatttgaggaaacaactttgctggctgtgaaaaatgataaacagcatgagggagaatttgctggcaaaaaacaaaacaacaacaaaaaaactaagtttataatgcaacagtcccattaaagagtaacatgaggtgcccttatatacttttagtggcaatgtataacatttggaagtaacttggtagtacttattaatcctttgcaaatctttgcccaaatgagtgacagggtctcactctgttgcccaggctggagtgcagtggcatgaccttggcttactgcaacctccacctcccaggttcaagcaattctcatgcctcagcctcccaagtagctgggattacaggcatgtaattacatgcctggctaatttttgtatttttagtagagatggggtttcaccatgttggccaggcttgtctcaaactcctgacctcaagtgatccacccaccttggtctcccaaagtgttgggattacaggcatgagccaccgtacccagactacaaaaatgtatttatggggatgttcaatgcagtagcagctcatatgtccattcatagaagatgggttaaactctgacgtagctaaaccagctaacacttttcaaccattaacaaagaatggtagagtggaatgtggtggcacatgcctatagtcctaactactcaggaagctgaggtaggaggactccttaagcccaggagtttgaggtcaacctgggcaatatacaatatagtgaggccctgtagagatctataatatgttctgctgtaaacataagtccacaatataagggccatttttttttttttgagacagagtttcacactgtcgcccgggctggagtgtagtggtgcgatcgctgctcactgcaacctccacctcccaggttcaagcaattctcctgcctcagcctcccgagtagctgggattacaggtacctgccaccatacccagctagtttttttttttttgtatttttagtagagacagggtttcactatgttggccaggctggtcttgaatgcctgacctcgtgatccacctgcctcagcctcccaaagttctgggattacaggcgtgagccaccgcgcctggcctaagggctattttttaagttgcaaaacaaaaacaaagttttaacagttgtcattctgatatgtagaattattaggaaacctacactatttattttttatacttgtatatactttgtggttttgttgttgttttggttttttgtttgtttgtttgtgtgagacagagtctcactccgtcactcaggctggagtgcagtggggcaatcttgggtcactgcaacctctacctcccaggttcaagcaattctcaggcctcagcttcctgagtagctggactataggcacacaccaccatgcccaaataatttttatattcttagtagagatggagtctcaccatgttggcaacgctagtctcgaactcctgacctcaaacgatttacccacttcagcctcccaaagtgctgggatcacaggtatgagccaccgtgcctggcctatacttgtgtatactttgaattgtttcttttttcttttcctattttattttattttattttatattttattttattttattttttgcgacagggtctggctctgtcacccaggctggagtacagtggtgcaatcatgactcactgcagcctcaagctcctgtgctcaggtgatcagcctcctaggtagctgggactacaggtgaccaccatcacacccagctaatttttgtattttttcatagagatgaggtttcaccatgttgcccaggctggtctcaaattcccaggctcaaatgaacctcccacctgggcctcccaaagtgctgggattacaggtgtgagtcaccacatccggcctgaattgtttctattattcacatataactttgtaatcttaaaaaaaatacttaagactttaaaacaaagatgattagagcctggattaagctagtgtcggcagcctgaggagggaaggttttggatgccattgccaaagtagattgaagaggaattggaatttgagggatgcaggtgattaaaggagagggggaagagtcaaaggtgacactcacatttctagcttggtaaattggttgtttgtttattccattaatagaaatagagaaaagagacagcagaggagggcttcattgaggaggatgactttgttagtttcattttggatttaagtctgagggtcctgaaaaggcagctatatgtttggcttgaacctctccactttccaccttctcagtaattcattaatattttggatgtcctagcctgttgatgtgtgtgtactggaggtggtggtggtgggagctaatatgtttagaagttaacatttcatctgtctttatccttttactctcctttcattcagaccctacaattattgctacagggaagaaatgtggccttgcctgtgaaaatctagtttttggaattttttttgcttgttttccccctaaaatttagctccaaaagagagaagattcttaactagtggaaaaaatgtcttggtcagaaacaggagaaagaacatagctatcctagacaaaaataataataataataataataataataatcataaaagcaagggagggagggagaaagggaaagaaagagagacagaaagaaaaaagaaagaaaagacaggaaaggaaagaaaggagggctaggcatattgcctcgtgtctataatcccagcactttgagaggctgaggcagaaggactgcttgagcacaggaggtcaaggctgcagtgagccatgtttgtgctgctgcactctagcataggtaacatagggagaccctgtttcaaaaaaataaaaaataaaaaaaggaggaaaggaagaaaattccagtagaataaagaaaaaaggaaaaagaacaatatttacaagtacctgcagagagaaggtgagaagatgaagacctgttttctacttttttgggcagcactgctaaagaaataaaaaagtacccagaagtcgcaggactctaataaaatggaacatcacctctattcctgcctgttctttggaggagtagaaggtgaggaaatggggaagtgcaggatgagtgattctggagaagacatggctgtgctcatgttgggctgatgatgtcactgataactaaaacaaagggctcagccaggcacccagaagcctcagggccaccgcaccctaaggaccatgcaggctgagacaggactcttttcagtaatccggaagatggctccaccctctctagtccaggccataccctgggccatacccttagcagtgctacccaaaaaagtaaaaaacaggtcttcgtcttctcaacttctctctccaggttcttataaacattgttctttttccttttttctgtattctgttggaatcttcctttctttctttctttccttttttttttttttttctgaagcagggtctccctatttttttccatgccataccctgaaaaaaatctctggggagaggatcccaaagagacaaaggctaattttctcaccatgcttatagattaggggctttgagaaaatgagggtatgtttttaaagtattttaatagtggactgatctattttacctcctggaccagatgaaatgggaactgttccaattcatggagcaaccagacatacatgttcaaacaattatgaaaaacatacaacagatatttatcaacaaatacatcagtaaacaaacttacatgaccctgcttggccatcactgtttcttttcaacacacacacacacatttacaaatacatatatatgtgtgtgtgtgtgtctgtctgtcgatatatatgtgtatatatatatatatatatatatatatatataaataaaataaataggtaagagctgcttatagccctgaatccccacagaaaaccccgtctgtctttagtttcatgaaagcattgtactttttctcattatttttcagaccatcacagacacttctgatcagtgttccacttaagcttagccccaaatacacagaggaattttatactgaaagttaaagaagcgacagtagttagattatctcatgcctcctagattggctggctttgagcactttttcaaagtgtgtaccaactagggtttgtccaccaagttgcaatggcttgtatttgagtcagccatacgtgctcatggataaaaacaataagaactctttattaatataaatatactctgtgaaggcaaagatgtgctttaaaggaaatttctgagcatgtgagaagtagatgagttacatgaggttaggagcatgcagctgtgaccctaaatggggagaatacagccccagggagctgtgatgcacggccactgggaagctaatgaaatgggcagagccaggaccagtggggtagaattaaggcagaagcttccctcttgtgctggacattgtgctggtctctttcctgcccagcacatgccaggtaggaggctataatgtgatcatgggtcattccatgccacaggaatggattggcctgagctggccttcttcataatccaggaataaggagaagaaagaggtaggacagaagatggtcctttatgggggatgagggggatggaggggggaagcttctagaggaattggaattttcacagaaagacatttctgcttagatactaatacagacgtacatatttggacaatatacatgtagaataaaaattatttgaattacttcaacaattatgcctacttttcaaaaggctttgacatcagctatataatttagccatttggcaatattaatcataacttactaaactaaatttgacattgggataacagaatggtaaaatgcaaactgaaatcatagctttatgatcacatgaatttccttcaacagctgttcactgttattactacttatacctttgttagcattccaagaggatctgataatcatagctagcattgattgagcaattattatataccagacattcttctaagtgccattatctcatttaccctacataacaaccttatatggtaagtatcttttcctagtgccttttattgatgacatgaatgaggcacagaaaaaataggtaacttgttcaagtccacacagctagttagtggaagagcaggaattgaatccaggcagggtggtttcaatacttcagtcttagacataataccatattgccttcctggtacaatggatgctttacgtaggaggtgttatagggagaaattcccacattttcctttttatacttgtatattgtttgaatttgtttataataaggatacatctcttttgtaacttgaaaaccacaaagaagaaatagaacaataaccccattcctttaaaaatagcattgcagtagctatttcaggtagtgagatatcaaactggttttaacttttttgtttatttgttttagttttaagaatatccaaacaaagacggatacatgtgaaaacttgggacagtaaaattgtgacctttctataaagacaaagaggtaggaatcaagccaaagtgagattaggataatgtcaggtcttagtactctattctgcataatagtttattttaggtaattctctatattggttggcttgctgaagctggtgtgtgtgtgtgtgtgtgtgtatgcgtgtgtgcgtgtgtgtgtgtgtgtgtgtataaaaaatctttttagtcgttcttttttatttgtgcttctcaacatgcttaagcaagtgatatctttccatataaggggcaaaagaatttggggctgtgaggcaggctgacaaagaggaaatatatcctgtctaagcaagcaagaaaaagggaaaggagtgaaaattcttgcaacatttagctcttccgaaaaaaaaaaaaaagtggtcatgatttctcctatagtagttgatttgtcactttacacaaaaggcctagaaacatatccattatagatatgcctccttggggctcagcctctatctgtcaagtaggggtaatgggtcaatggaattgattatgtgatctataaactttgttccagctttaccatattgtgaattttgaggtttggtcaatgaatatgcaaatccaaccagaagtatcattggatacaaaagtatccgtatcatttttgagaataaaatttccaacagcatttttatatatatcagtgaagatctgtgtcacaaaacaaaactttatgaaataggaaataatctggctgatctttgacagtacaaaatttgacattccaagtcaaattttatgtttaggtagaatagggaagtattggttttgcagttttaccatatcaacacatataatatttctgcatagaaaaacggaccatctaaatgggaaaggggagagccaactagtgggtaaaatgctgtaacagtattttaatgctcaaggcccaattatgacttgaagatgttgttgtactgattagcaatactaactgaaaatttttctaacaggttcataacctaagtattttccagctatatactgttggtctcagggattggcaaagctgaatcagaacacttctttgccaagacttgtctgcaaattcttaacctttttttgtttgccaagaacaaagaaaaattgttgtaaacttagctgctgctgtaacatatgagcagtcttttccgaaaatgcaaattagacaaacaagaatcattacatcatttgcagaaatgcagttacatttggtttctgctattgtgtgtgtatatatatatatgtatatatattactttcatatcttacttgataccttttgtagtgctttaccattttcaaagcacttgcatatgtgtcgtattatttgatcttttctgagatccaaagtttttaacatgcttcatgcttgaaaactttgatacttcaatttatatgatgcatgtaacatacaacaaatgttttgattatggttgtatggaaaattcttattatatccccaaatataggttacacattttggcaaagtaagcagttattgatttttattgccacatgaactggattttcaaatattaccaaatgcatgtgtttttgtttttgtttttaatacaaaaacatcatctaatggatagtgatttatgccagtatgtaggaaataagcaagtattttgggtcaggtggattactgctgaagctttgattaggcttgaaaatttgatacactggaaagctaactgttaccctatagattactaacaaactcattgcttcaaataaaactgttattgattgttcagattaaaaaaataatgtcgacttttgttttagattcagggggtacatgtgtaggtttgttacacaaatatattgcataatgctgaggtttggggtatgaatggtcccatcacccaggtaatgcaagcaacatgattttattcttttttatgactgtgtagtattccatggtgtatacatatcacattttctttatccaatccactgtttatgggcacataggttgagtccatgtctgctattgtgaatagtgctgcaatgaacacgtaagtgtgtgtgtctttttggtagaatgatttattttcctttggatatatacttagtaatggaattgctgtgttgaatagtagttttaagttctttgagaaatttccaaactgcttttcacagtggctgaactaatttagattcccctcaacagtgtataagcattcccttttctccacagcctcgccagcatctattattttttgacttcttttctgactggtgtgaggtggtatctctttgtggttttgaattgcatttctttgatgattagtgatgttgagaatttttttcatacgtttggtagctgcttgtatgtcttcttttgagaagaagtgtctgttcatgtcctttgcccagtttttttgttttgttttgttttgagacagggtctcgctctgtttcccagaccagagtgcagtggtgtgatcagctcactgcagcctcaaattcctggctgaagcaatcctttcacctcagcccccaaatagctggaactacatatgtgtgccaacacacccagctcattaaaaaaaattgtagaaacaaggacacagtatgttgcctgggctggtctcaaacttctgagctcaatgatcctcccaccttagcctccagaagtgttgggattacaggcataagccactatgctcaggcctttgctcactttttaatggggttatttgttttttgtttattgatttaagttctttatagaatcttgatattagacctttgcccactgcttagtttgcaaatattttctcccattctgtaggttgtctgtgtactctgtcaattgtttcttttcctgtgcagaagctcttcagtgtaattaggtcccacttgtcaattttgtttttgttgcaattgcttttgaggacttagccataaattatttgccaaggccaatgtacagaatggtatttcctgggttttcttctaggattttaaaagactgggatcatatgtttaaatatttaattcatcttaatttttgtatatggtgaaaggcagcagtccaatttttcttctgcatatggctagctaattatcccaataccatttattgaataaggagtcatttccccattgcttatttttgtcgactttgtcaaagatccgatggctgtaggtgtgcagctttatttctgggttctttattctgttccattggtctatgtgtctgtttttgtatcattaccatgctgtttttgtatcattaccatgctgtttttgttactgtagccttatagtatagtttgaagttcagtgatatgatgcctctggctttgttctttttgcttaggattgctttagttattcaggctcccttttggatccatatgaattttagaatagcttttctaattctgtgaaaaatgatgttggtagtttggtaagaacagcattgagtctatagattgctttgggaaatacggccattttaatgatattaattcttccaatccatgaacatggaatgtttttccatttgcttgtgtcatctgtttgtttctttcagcaatgttttatagttctctttgtaggtatcttccatctccttgcttagatttattcctaggaattttaacttttgtgtggctattataaatggcattgcattcttgatttggctctcagcttgctgactgttcagattattgttttataaaagccacaaaaatgttccattagctaaaagtcacgtttcttagttaatagaagtcatagtacataagaaggtaagagtgtcaaattattactagttgtgaatgaattattactagttgtgaaagaatagcaattcatggttttgtttggtcagcaactactgcaccctagtgatgatgaattctctagcagattggaaagatacttagggagggaaaaaagatgactttattaaggatctctggaaataggaaaatatttaagaaattctataagtaaaaatgagtaattttatgtcagaataaaataaaatttggctgaatttatagttctccatctgcctgcttgcacctatttggggcttattttacctttgtggttaccctgagaagcatggtatggctggagcctaagtgagttctttgttttccaaccacattgtcctcttttctttttataaaatacatcaaattccttgcaggtttgtctgtctggagtacttacccaccttctttacttagtaaagtactacttcttttttaggtgtccatttaagttcaaatccttgaagaacttttattttgtaataaagattagattcatatctcctgttaaacactcttatagtattcaggatataccttctaagtggtacatgtggggcggccagcagaagaagattttgtattaggtatcacatttgagaggaaggaggccccgtggaaaaagcttcatcaaaagaaaacaaaagaggtgtttatatgtttctcaaaaggcatgtatctatgtgttggtgaaaactgccttaataagtattacatgtctaatgtgtgtatactaacatgcagctctacgaaatatacaaaaaagttaagcatatagcctatgcttttgaaagcttgagatatatttggggaagtaactatgaagggatgtcccatgtagcctcatatggagcataaaataatgaaatgctatttattatatgtcatgtatgggactggcctgtatggggtcatttgagtgctaagacaagatttctttaatttgcagtactttcccacaatattcatatgagttaatacattatacttaggaaattgcccctaagataattaaattaaaaatatattaccatattaacatgtaaacacaaattggtttaaatgttctctagcaaagatcaaatctaggacagagaaacaggagaagaaaacaggaaaatggggctcagagcaggggaatgctgtgttgtttaaaagccctggatgtcaagatctaaggaaaagataaaaaaaatagaaccaccaccaaatataaatatttatttccatatctcacaattttttcctaggccattgctggtgacagactttccagtccttttcagaacttactcatcacatccttttcatgcttgttattttgatcctgaacatccttgcaattcaaagagcatacagaggcagagtgaaattagcataatgtcacctattgctatgatgctcgttacctctacctccagaacatgccaaggaggcttccaggagccccagaaacacagaacagcaaatcttcaaaagcccagtgcccagagcagatagagaagaaaattctattttgaaatccataaagaatctcataattccttgcaatatctagtcccaattgtgtgggtgacaaactgacctatggcagaattaggaatgtgaataggaatgaggcttggagttccccattcctgctgccctaactcccactggaatgtaatttgtacaaagagtgacgacatgtgaagatgtaaaaaagaggactagagatgtcctcctgagctgcacaaggaagaaagctttttatgaccatccaattctgcaaaggacctagtttcccagtgcttattaccataaggatgcagaaagaaaaaagttcacagacataagatttcatgtgaaaaccaagaaaaaaaggttactgtattttttaaaggaatagcatttgatttggtgtaatggcaggataaagaaatgagaaataacagtggggaaaaaagttgactacaaagatgtgaataagatcagatggcatagtaattttattcgtaattaaaaatctggttcagttaatggagagatttaatttcaggagcattaactagtagactactggatacaatgtacatgtttaaataaatcataaataagtttctcctaagagctactttaatgttgtagcattctaactaatgagtagtatgacaaaattacgttgttattataatagcaatgtatcagtttttctgttgatgaaatttcttagggttagaatttttttttaccagatatgaaatagacttacacttaaatactgttgaaagttgccatataatgtggctattatcttggagttaattaaagttaatttagttttgagcattattaagctctttaagaaaactggaagacatcaaattcttataaaggaaagcaggacctatttgttaaaacaaaaagaaatagctctgtattcaagagtagttttctcaatggatactttgcccgtaaacattaaaactcactaacacttaaaataaatagatttgaatggatggctcttaccacaagttaaaggttgttatttcattaagctaaatgtagtacgtataactgatttttttttttgagggaggaggcattaccttggagaaggaaatggcttcagataacatctatgaaaataataataataataataatgagattatacgcaagatttgaaacattttcagagttggatagaaatttacacaaaccagatttcccctgggagatcctaagataaactaacaataatgtcacacacatatcctgttattttatttactaaattctaaattaaatttctgctctggtgctatgaaggtcacccagcgtactcttttagataatacaggagattccaggattgaaccaaaaccaagctaagcagaatattttccttccgagagatttgaaatttgtgataaacacgtttgattttttgtgtgacattatttggtaaaagtaactttttcagaagctcccccaaatctctatacccttctttgtgccaccgtgttttcttgtgtattggaggtggataagcaaactgcaattgggatagattttcacctaaatttctcacattttcataagtgttctgttcctcttatttactgcttgcaatccacatgtgtatactgcacacacactcacacacatatacacacacataccctcatattctaaagaataaaaacacaggcactgtaattgcatatgtgtatacttagggggttaaagcctggcttcaccactcagtgctggtgtgaacttggagagcttacttagctcaggtccttttgttttcttctgttgtttgtttttgagacagggtctcactctgttgcccaggctagagtgcagtggctcagatttcagctcactgcagcctccaaattccgggcttaagtaatactcccacttctgcctgtagctggtaccacaggcacgtgccaccttgtccagctactttttttttttttttggtagaaacagggtcttgccatgttgcccaggctggtctcgaactcctgggctcaagggatccacccgcctcggcttctcaaagagctgggattacaggcatgagccactgcatccagcctagcccaggttctttacctgtacaatggggataagagtactgatatcacagggtggttgtgaaattaaaatgagatatgtagagatatgtaaagctcttactaaagtgccagcaatataggaaagaacaacaaatgacatttactctttttatgttgtctaaagtcatatgagtatatagtgaagttttcagcataggctctgtgtgagaatacagtagtccccccttctttacagttttgcttttggcagtttcagttatctgcaatcaactgcagtctgaaaatattagataaaaaatcccagaaataaacaatttctaagttttaacttgtgcactattctgagtagagtgaaatctcgcccatcctgttctgtccctctggggacatgaatcctctctttgtccaggggatctatgctgtctacactccccaccctttagtcacttagtaaccatcttgatgatcagattaactgtcacaatgtagcagtgcctgtgtttaagcaacccttcatgtaatcatagccccaaagtacaagagtagtgacatcaacatgttattattattattgttcttttttattattaagtattgttgctaatctcttactgtgactaatttataaactaaacttgatcataggtatgcacgtataggtaaaaaatagtatatatagggtttggtactatccatggtttctggcatccactggggatcttggaacatattccttgtggataacggggaccactgtagaggcaaatggatatagaatatcctttaggtttatttttttgtctgtctttccctaaagcaataaatataaagaaaatctaaatagttggttttgacaacacataggtgtattatattctgcctttttagtgctcagtattccaatatttcattttgtagatgtgaaaattaaggtaatcaagggtggaaatgcttattggagatcatggaactggctcgtgatgcaacagtcatggagtgctggtttaaccgagttgaatacaacacgaatgcccccatgaaaagcaatgaatacagaagtgctcaaaagagtttacctaagaaaataaataggaagaataaaactcaaagacagagaaggtatattaatattcattatcactgaagagaagtaaacttaattttttaatattataagttaatgacctcaagcaaagtcagatattgaaaggtgatcgtttcaaagattgaaactgagtgaaaatatttcaggaaaagagagttttagctattcttaaagaaagagaaaaaagcagattcaaggatagctttttgaagaagatacagcttgaaatggcttcttttactccctcagttaaaagtggtaatggatgtgcctaactaaaattcccacaggaaaaacttctttagttcacctctctcttcctgctttttttagttgatttcctatgtaaatatgagagctcttaataaaaatatgacagaaagttggaaagagttttcctgaaataaataccagatgagtatagtggttacttgaattatgtgcagaaaagaagatgatactctacaagctcggcttttcggcgacaaatctgaagtccatctccattgtgagtatttcttgtgtggcttggacttcctccattccagagaaagaatcagtcctttgggaatccatgaagtgtgtcctactgtgccaggcctcagccactaacacaggtccctagagagccacgctgtcttgctccatgacctccaatgagaaccccttcttactgccctttcattgattaaaacgagacatttgctgggacctcattgtgggctaagcacattgcagtcagtttccacataatgttgctcattggatcattattttaatttttctctctttacctcccccacagctgtctttccttatctgcaatgttgcatgcacaatatttactttcagcaaatgatgtaaatcacccttgaatgaaaagactgaaggtgcctcacctttcttcttcctgtcctattactgtgttctcatggccttggattttctctggataaccacgtatcctagttcatgcttttgtgtcataaggaaaagttggcactcccttttgaaaagctaaacttcccttcctgctattcatcctgacatttctgccctttattaggaacttgattcaacaattttctcttctcttatatcttcaatttctccctttcttgtttctttcctttaggcttaaaaatgtctttaacatccttaggtctttcctattgttaaaaacaagcaaactcagaatccttttctcaaacttaatactttgttgagttggcacccaatttgcctttttttttttttttgagacagggtctggctttgtcacctaggctggactgcagtggtgccatcatagctcactgcagcctcaaactcctgggctcaggtgatcctcccacctagcctgagtagctaggactataggtgcccaccaccacatctggctaatttttgaatttttcatagatatggagtttcaatatgttgtccaggctggtcttgatctcctgtgctaaaacgatcctccaccctcagcctcccaaagaagtgctaggattacaggcatgagtccacgcccagcccttaatttgtctatttttattgttaagtttctcaaagaaatgctcaatgcctgggtcaaggacctctacagatcttgagtctccttaggacatccctttccaactactcatctatttgatgccagattttctacatgtacttcaaccaaaacaacatattgcaacagattgaatgcagaagcagatatgagaatctgctgccttctatgaagcaagacattaaagagatttgcaaaaatgtaaaccagtgctctcttcttttcaaaattatttttattagggaaaatatatttttcataaaaactaggttatttatattactatttaatggagttagcgttgctatttttaaaagagtttatttaaaaagtcttaacttctttagtggtaatttctagtacggtaaacactggtagatttaacccacagaatcagaagctctttgggggtcctcagtaattttaatagtgaaaaggagttttaaaataaaagtagttgacactttatgaggctgaggcaggtggattgcttgaggtcaggagttcaagaccagcctgaccaacatggtgaaaccccgcctctactaaaaacacaaaaattagttgggcatggtggcacgtgcctgtaatcccagctacttgagaggctgaggcaggagaatcacttgaacctaggaggcagaagtgagcgagatcatgccactgcactccagcctgggagacagagtgaggctctgtctctgaataactaactaactaactaactaaataaataaataaaaataggagttgcaaacagtaggtctatatccgtgattgcttttcctcaccactgttgcctcctttttttaaatctctgaccaaagaactggctccacttggtgtcctgtatcagatttcttgggccggccatggtggctcattcctgtaattccagcactttgagaggctgaggcaggaggattgtttgagctcaggagttcaagaccagcccgggcaacatggcgaaactctgtttctataaaaaacacaaaaattagctcagtgtggtggcatgtgcctgtagtcccagatacttgagaggctgaggtgggaggattgcttgagcctagagggtggaggttgcagtatgccagaccttctagatacaagcaagcctcttaccttagcttcctgagtggctgtgatttccctagtcttttatcctccctagttgctaagcaatgtttaacagtgcctacctctcatttcttcttgatattctttccttctacggcaacaaattcccctgatttcttcccaaccttcctgactacccatctttttctctcttggttcctttttcctgggagctgtattttcctcttagctgactcagtatgcttttccttaaagattttttttttctattgcccttccaaaattttttctagatccaaagcctttctcacagtgtcaagaaaaaaacattccagttgccagatgaacagcctgtttcagtatcatgggtctaaaaccagacaccggtttttcctccagcaattcttctggttaacttgatgcctctgtctatcatggaaaccgaatttcctaagtcatgcggatttaaaatgctagaaaatttcttactcctgtcaccactacatctaatgaatcagatgttctgtttgttcttgtgtcatcccagtccactccctgacaaagcatatctgcaagcttatcatcataaacctaggctatttcaatgctcacgtattaaccgctcatcacatgaatagaatttcatttgcctgatttaccctacacagcccttcaaatttatcaacgaaatcactggttttcaacttttatttttaagtaggaaaagcttttccgttaagtttttgcaaacaaatataatgcaatccaatatttgccctccagagctatgccgatttaccgctgaaaccttgagcaaagaaatactcaaagcttcttctaggttgtgtatgtatcacaacagaggaaggaaattatgagatgggcacttgggagactgttttcttggttgccctctccttgtgaaaggtagggctacaagcccccatttgagccaaagctaaggagtccggtgcccatgaaaaagacgcaagcaatgctgtcctccttgatggaggctgcagaggccagaaccacacctgctcagcctggccctgaggctgcccctgtggcactgctgaaagtcagtcttttgtcacaaggaaggcagtttttctagacaagattattctcatcttaagcatgaggtaggggtgtgtgtgtgtgtgtgtgtgtgtgtgtgtgtgtgtgtagtgtctaagtctacttgcctgctttctgggaactggtaagagataggaagatagaagtcatcatcattccaaatgtaggctttcacttaatttctctattttcagtctgagaccacacatttacacgtctctcagcctgcatccccaagctcaaaatatttctgctttaatctcttcagagactaaacctcctgtcccccactacatggagaaggcttggttacctgttattcaaggtgttgcctggatctgtgtatatactttaattcattccctctgttttcagcaccaacacccgccccctttcctcctagcttccttggtacttggtgcctccaatttttgaggctttctataattacttagcacaaatcaactttcttgttgattttcttctttataggagcatagatttcagcatttgtgactttgacaagtcagttgttacaaattcatcagctgcccatctgataaaattttaatgtcttttctactctatctcttctagcttttcttttcttgtgtgtcgatacccattttatttctttacttaccctcattttagtggcatttcaaaaggcgtactagttacctattgctatataacaaattaccataaacttagttgcttaaaacaatgcacatttattctcttagagtttctgtgggccaaggtactgggtgtagctcagcttggccccctactttagagtctctcacaaggctgcagtgaggtgctggccaagactgggatctcatgggaaggctcaaaaggaaaagcatctgcttgtatgctcctggagttacaggcaggttttagttcctgatgagctgatgaactgacagtcttgttctttagtgactctgggccagaggtcaccctcatcccttgccacatggctctctctctatagcagtttgtttaatcaaagctagcaatggtgagaatctgccaacaaaatagaagtcactattttgtgtgacataatcacagaaatgacatctcatcatgtttgccacattctattggctaaaagcaagtcaccaggcccgcccatactcaaagtgaggagattatacaaggcgtaaataccaagaggcagattagaggctattttagtctgttgatataggaggccaaggtgataaacacatgggtccaagtctctctctaaaactggagtcccctctctctcacttccatcaagcttacagtccacttctcctgtcaaggtcaagtagtgacctccatcttgcacaatccagtgaactatcccaagtgatcatcatactcaaacaaacaaccagtagcaactgacatattctcttcctgaggcattttatttctttggatttggggatccctcacctccttgtcttttcccttcatctcttgtctctgactcacaggctcctttgttcattctcatttttcttccttttggagggctaaatgctagaggtctacagggctccatttgtagcccttcactcttctgtaattgtacctaagaaatctagtctcatgacttcatagtccatgtatatattgatgactcttacatttatatctccagctccaacctttcccctatgccccagatagtacccaattggcatctgtacttggactcaaagacattgcaaacttaatttctcaaagaattaaaaatagaactaccattcgatccagcaatcccactacttggcatctactcaaaggaaaagaaatcattatatcaaaaagatacccccacttatatgtttattgcagcactactcacaaagggcaaaaacatggaatcaacctaagtgtccatcaatggattggataaagaaaacgtaatatatatacatacacatacaacacacacagacacacaccgtggaatactactaagccataaaaaataaaatcatgtcttttgcagcaacatggatggaactggaggccattatcttaagtgagataacccagaaacagaaagtcaaatattacatgttctctacttataagtgggagctaaatatgtgtaccatggatatagaaattggaataatagacattggagactcataaagttgggagggtgggaagggttcaagggatgagaaattacttaatgggtcaatatacactaaaagctcagatttcatcgctattcagtatatcagtataacaacaaaactgcacttgtaccttctaaatctatacaaataaaagctaaaaaatgaaaacaaattagacatctcaaatgacaacttaatgcagaactcttgatttcctcatccttccctgacctttacctaaaaacacactctgcccaaactgatgcccatttcaataaatgtcactaccttccacccagttgcttaggtggaaatccaggcattttctttgttcctcttctttttttcacaccccacatacacttctcactcagcatatcctgacagcgccaccttcagaatatgtccattatccaaccgcttctccccagttctcctgcaatcacccaggcgtggtcatggttgtctcttgcctccccttgactggtacatgtgccgttcccctttgcatcaagcttacatctgctccaggatgtttatatttgcagttctctccacctgtaattcttatccttctgatttgcatgtaactcactcctttttatcatccaggtctctccttaaataccacctctttggaaagccttccttgatcactctgtgtaaaatagccaagcctccgttattcactatcttcttttgctcttttatttttcatatatgactacgtgaaagtactgtctgttgttatatgtctagttacttgttatgtgagtataagcttaatcaaggtgatgctttattgcacttagcgctgtttccctgcaatccagtacaaagcccagtatgcaagttataggcatgtggtaagtgttggatatgtgcaccagttgttggacaggattgaacttgcgaggtcagctttctcaggtgacctcaaaggcaagcatctagtttattgagtagtacaacaataggtatgttgcatgtacatatatgtataacagaagtttatttttaagcctgaattagtgatagcaactctgttcatgagtgattatgtggttctttttcatctttactctttctcagagaaattcttctcttcttcccacattgtttgactgcttagagtagataatagaggagtggtaagatgtctgagtatataatgtaagggggtttggttcttgtcatatatagaatacatataggtcctattataaacaacatatggttcttctcatatatagaatacatacaggtcctattaaaaacaacatattgtagctttaattcaacacacgactggttcttgtataaagtttcactgagatctttattgtggagaattgcatgactattccagtcctggactcaatttgaataaaaacataggaaccaaattcctccactaaataactgattgatacttaaatttgacaacgatagctttatagaatagtccagaacatatacagtcgtacctcacttaacaatgtggctacgttctgagaaatgtgtcattaggcaattcccgtcattgtgtgaacatcatagggtatatttacacaaacctagatggtatagttcactacacacctaggctatgtggtacagcctattgctccttgactgcaaatccatacagcctgctactatactgaacactgtaggcaattgtaacacaaaggtatttatgcatctaaacatatctaaacatagaaaaggtacagaaaaatgcagtatagaaaataaaatatggtacacctatgtagagcacttctcacgaatggagcttgcaggactggaagttgctctgggtgtcagtgagtgagtggtaagtgaccgtgaaggcccaggacattactgtatacggctatagactttataaacattcttcacataggctgcactaaatatgtattaacaatttttctttcttccaaaattaacctaattactatatcttttcactttataaacttgtattttttaaaccttttgacttttgttatacttactttaaaacacagacacattgtacagctgtgcaaaaatattctttcttcatattcttattctataagctttttctgttttaaagttattattaattattattattttactttttaaacatttttgttaaaagcacacattaaacacacacacacattatcctaggcctacacaggatcaggataatcaatatcactgtcctccacctccacatcatgtcccattggaaaaagtccagggacagtaacacacacggagctgtcactttctgtgataacaatactttcttctggatacctcctgaaggaactgcctgaggctgttttacagttaactttttttcagataagtagaaggagtgcacttaaaagaacaataaaaaggatagtaaatacatagaccagtaacatagtcatttagtgtcattatcaagtattatgtactgtgcataattgcacggactagccctttataccactggcaggacagtaggtttgtttacaccagcaacaccacaaacacgagtaatgtgttgtgctacaatgtcactaggtgataggaattttttagctccattataatccttttttttttcttttttttgaggcggagtctcactctgtcgcccaggctggagtgcagtggtgctatctcggctcactgcaaggtccgcctcccgggttcatgccattctcctgcctcagcctcccgagtagctgggactacaggtgcccgccaccacgcccggctaattttttgtattatttgtagagacggggtttcaccgtgttagccaggatggtctcgatctcctgaccttgtgatccgcccgcctcggcctcccaaagtgctgggattacaggcgtgagccaccgcgcccagccagctccattataatcttatgggaccactgtcatatatgtggtccacggtttagagtatggaaatgactctatttccatacagtacttccaataataaattaagttgtttgatttctagattgaaaatggctttgataatcttgtaattggatttatatgcctttgagtctctcaagtagaactgatttacctttccattcctttctctttcctctctggtcacatccctattccacatttgttttttttgtaaccagatacacaaataatactttgtattaagtggttatagtgaaagctgggcattctgttctagtgaataatgattcttatattccaaggacaaactacctattaataataattgggtattcggggcttaaaagttgtatttgaaagatgcagccaggtgtggtggctcacgcctgtaatcctagcactttgtaaggctgaggcaggcagataatctgaggtcaggagttcaagaccagcctgaccaacatggtgacacctcatctctattaaaaaagaaaatacaaaaattagccagacatggtgggaagcacctgtaattccagctacttgggaggctaaggcaggagaattgcttgaacctgggaggcagaggttgcagtgagcagagactataccactgcactccagcatgggtggcagaatgagactccatcagaaagaaagaaaggaaagaaagaaagagagacagagagagaaggagagaaggagagaaaagagagaaaagaaagaaagagatgttatccatgatttagtggaaatgagaaaacctagaaaataccatgcaattctaatgaaaattctagaaaactagaaaaaaggaaagagaaggaaattgagaagaccctgtaatctgttgaaatgctgagttttcctaattaaggaaagtaaaattctagtcacttaaaatgcctccaagaaagtcactgtttttgtccatttatatctttctgctttctttttcattttttccctaaaaattaattaaatattaattacttttagaggaaagattactctgataaaatggtcaagaaaagcaaagtttcttactttctgtgccaaagattttcagccaaagtaataaaagaaaaatcttaaaaagggaaactatgcaattcgaatggaagatccattttaaaaagttattgtggcagtataaaatgatactgtgtgctcaaatacctaaaaacttttgcaacttacgaaatggtatttttagtattacttagggtgttgtatgggtgtcttatgtaacttgttaaggtaaagaattttgctattctcaacttcagtttatgcatctataaaatgagaaagcgcaaaataatacttctacctcatagggttatcgtgaaagttaaatgacagagggataaatgaaatatttagtatagtgcctaccacaaaagccaaagctaaataagtgatagccaagaacaaacacagaaaacttcctaaataaaaatatgactagaataactgcaatgtatggaccaacataagcatgtttaagagtgaacacaggtgctattagtaattacacctggaccaaaagtataacccaggatgctccctgacatactagaatttatggtttctctatctataatctattaacatagcaggcagtaaaccttctcttttgtggagaccacacatgcaccagacaagcagagcctggattcaatagtgtgccagtaactcacccagattttcaagaagtaatatttactgggattatggattaatcagagcttgtgtttaccaaagtaaagttcaccaatgattcttcaaatatgttcacaagctaacttggcttatatccatttacttataaatcagaagattccccaagattttactgtctgcctgattaaagctagtatgtgctataagtgttttcaaaatacttttttccaaaactgtccttgcagttaaggtgctgttaattcaaagtacctatgacttcctatcagaaatgaaaatgacacttaatgagaacaaaacatgttttcacttgaaatgcaattaaaccaaattagagaaacagtgtttttctaactaagataaaaacagctgtgtttatgaagctgctctaatggtattagaatttctcttatggaaacttttgctttatttaagatatatgatttttattttaattgacattttagacaatgatactttcattacaattttttcagtcaagtatttctttagggaatctttcctataattcatagtgagctaatttgatcatgtattaatagagatttcatggagatttgtttttaaaggtttttatgtgaaacctttaaaaggcctcccaacaaaaactttacttcatgactagatatgatttaatcatgattatgtcaaaattgtaatttttaaaatgccttaagaaaaataatttctgcatacatttgtgtaatttttctaaaatgcaaaatttgtaacaatttctaaggtgtagaaaaaacatttacttaagttgctggtttttttaatattcatgtgtatgttttgggattttgtagatataacctatgccttagattactacatgttgatgtgacttgctgatgtttcaccaaaaaaaaaagaatgcttccatttctacacttaacatttttttctttatctttcataattacggtccataacacttggagtaacaacatgttttcctgtgtatatataatataaatggttatatacaaacaatagaagaaatacgcaatttcccaaaatgataacatttgaagacgtcattaccaacaacaacatcactagaaacattactgctgttaagagcttgatctagaaaatataagcttaaactgctctgtttggaaacagcatgtaatcgggatatttaactagaaattcaagtacaataaaatggatttaattagttatgtagctataaaataccttaaatttttttaggctatgtctgcatgggcaactacttaaatgtttttagattaatttattttagtcaatttaattttaataattacctcaactatatgttattttcttcctttaaataatcacagaacacgctgttttaggatcaggtagaagctgagacaatctcttttgaacaaattttatttttattccaaaattaattgtcctaaaaatagtacatttagccatgaaaaagagaaaacaagtaaacctatcaaaatgggacactgttaattaactaaacatagaaaatagattcattcattatccaccaaaaatttcaatgtacctgccaggtaaaagcaccatattcagtaccatgaaagtgataacgattccaataacagaacatcttccctcaaagaacttatcacatgtttatgtataagtttaaatgcattgaatgtcaaaaatgcagatagcgctttgatcaaggacattttagcaatgtattcagacaggatctttattttctagggttttcattataaggcagaaaggttagactaaagagtaatgttaaaaatacaaattatttttgtattctagacatttctataagaaatgtatggaaatagaactgtaattttggcagtttttgtcacagtgtcagtgagcaaatagatgtcatactcatgagtacagaaagaggacattctctttaacagccacatacttcttacccagaaacccttggagaagatttataaacccacatactcagaatatggtaatgaggaaatgctgtctgccctgggaaggggaagaggatctaaaacatttaggacaggtaattccacaaccatgccttaagataaatccatgccttgaaaagtaaaaagaacagcaaaaacagctagttagtcaaaggtcaagatagcaaaccctagctggtaaacttgtctgaatctttactgtattcctcaagctataaactatgtttatagactccttcaaacaggattaaattttggaggcattttcttaaaaaaatagtaaatccccactgtaaaattagttataggctttggacaggattcttgccaatggggctcagaggcttaagttttattaatttcacagtaactccaccttagttcacagatattttcaaaacatggaaagtgtgattgaagtcaggtaagtctaatcaaatatgagttctggtgccacagaacggtgatgttgaaatacttggcttttattggctatttatggcttttattggcatattaatgtcttttactgatgatctcaagttctgtctatagaaacactgatgtctgattgtaacagtttaatcaatgtataaaccaatctggatggttcagatctcaattccaacgtttcctttagaattcaggctcaatttatctaaattgggctcattatattattattaattttactttggctgtgggctgagttaaagcacactatgtttttgagcattctaagattgttccaggatttaaaaatttaagattactttggtttcttggaattatttaatacacactgcaattttccctgaaaaacacatgtaagctaaaatggctctatggaaatgttttatgttttaatgaggttgggaaacagagataaattcacctggtcataatcatatggtaaatattgatgaaaggaacctttttctaaactgcatagctataattctattccagctgattttgtagatttaaaatattttaccctgtttttgtgtctcttaaggagtttctgtttgggttatttgtacagatcaacagataaaaacttatgtcctagaacaaaaacagcacacttaaacacatcttttctttcaggccaaaaagtttgctgtttcaggaccatggacctccttaggaacatgtacatatttccctaatgaatccttaggctgtgatatgttttcgagttaaattgttattactgatagaaaagttctttatgtctgccataaatgtgcattaaagtttatatagcattcaccttcatgattggtgttttatcttactgattattttggcagagaacaaataccaaaagtctccccatgagaaataaaaacaaaccacgaccctctaaaaatagaaaaaaagccacaactcttcaggtcctccttggacccatggacaaggctcataaacctccttggtgtccattccatgttctgtgaatctggctgatggtcaaagaaagggctagagacaggatgatctacaaatagaggagattgaatttccaaatgaggtttgatcatctgctctttgtgaattttttccaattgcttccccatgtgccttggtttagcctttcaaaaaattagaattttatacccctaggatgtaaaataccatgtcagcgcactttttgtgcctggaatgcaccttggagatagccttgcccattgaccagctcttcatttttcagagggagaagaaagtgaggtctgggaaagtaaaatgcctgcccaaatccacagagctaagaagtagcagagcagagatcattaccacacattccaaactttcttcctatttatcatttttctccttgagccccttcttgtctgagacactacatcaattaaaattattttataactgcaacatcgtacaattgccatgtaacacattgcccaatgcaattcaatcttagcatctggaaacaatactcatttattaactcacactttgtaggtcagaagtctgagcacagcatagcaaagtcctgttcttagggtctcaccaggctgaaatcaaggtgttgaccgggccgtctcctaatctggagtgtggagtcctcttccaagtccattcaggttgttggcaggattaattcgttgtagctgtaggactgaagtctcttttcttgctagctgtcagccaggggcagctccaagctctcagacgctgccctcaggtcttagatgtgtggccctctcactatacgacagctacttcttcaaagccaataggagaatatttctcttcaggaaaggttcactccctttttaaggactctgctgatgaggtcagacccactcaagacaatctccctcttgattagctcaaagccaaccgactaacaactagtcaagagtggtatcccatcatagtcgtaattctcacttgtgctcaaaggggaggggatcatacagcatgtgtgtaccaggggacaggagtcttgggagtcatcttagaattctgtttgttgggccgagcgcggtggctcatgcctgtaatcccagcactttgggaggccgaggcaggtggatcacgagatcagaagatcgagaccatcctggctaacacggtgaaaccccttctctactaaaaaaatacaaaaaattagccgggtgtggtggtgggtgcctgtagtcccagctactcgggaggctgaggcagaagaatggtgtgaacccgggaggcggagcttgcagtgagcggagatgcgccactgccctccagcctgggcgatggagcaagactccgtctcaaaaaaaaaaaaaaaaaaaaaaaaaaattctgtttgtcggccaggtgcagtggctcacgcctgtaatcccaccattttgggagaccagcctggccaacatggtgaaatcccatctctactaaaaatacaaaaattggccgggtgtagtggcgcatgccagctactcgggaggctgaggcaggaaaattgcttgaacctgggaggtggaggttgcagtgatcccagatcgcgccactgcattccatcctcagtggcacagtgagactccatctcaaaaaaaaaaaaaaaaaaaaaaaaagaattctgtttgtcacgttggtctgattctactcattcaagtactagatttccttttgcctcctcttaccttctgctgccccccaactgagttggttcattgtcttccatcctacagaaatccagaaagggatgataagagaaggtaaattcagactagggtgacgaaaactccaaatccatgaacatatggcatttttattgggttcatgtattctttgcagctgtaagggcattggccagggataattcagaattaccttttcactaattactgaatagtaaaatttacctattctttgggcatgaagcttcttttaatacggctggcctggattcagagatgtctggggacacctgtgctgggttggcaggagcagcagcagctggaagtcaggggagagtggcaactaaagacctgccattttcttagtgcctatgcaggctgagactttactttcatgagctcatttaatcttcacaatggtgactgatacagtcaatattataatcctcattttacagatgaggaaatagcagagatgcagcagagtcagagttcaaagctcggtcagatacaccagtgctttttcaaggacaggcttctccttctcaggttttggttactcttgttttcttttttcttttttgagacagagtctcgctctgttgcccaggctggagtgcaggggcgagatctcagttcactgcaacctccgcctcctgggttcaagtgattctcctccctcagcctccggagtagctgggataacaagcacgcgccaccatgaccacctaatttttgtatttttagtagagacagggtttcatcatgttggtcaggctgggctggaactcctgacctcaagtgatccacctgcctcggcctcctaaaatgctgggattacaggtgtgagccactgcgctcagctgagacagtgaccctctgagggtctcagcatatttaggcagagattgggggatggcggagggagctactgagtgacaggcaccctctgagagggagcctatctcaagcaatcaaaaaatatcaactatatgtagggactctttctcccttcaagagttacaattaaacttttcagaaatcaagatcaaggctatagatgataaaaattttattcctaaaggaatttatagacaagaaattgattgaaccttataataccccatgatggttcatgagaaacacgtgttcatatgattataccatgtttttaaatatggggaaataaagcacagagtaggtgaatgtgaatttagggacatcaaaatgtaatgacaaaaatcagctaggcttgttcttgaatccctcaaactgtaacttttggctgaacaaatgaattaagatatagctaatacagctgcagagcttggaaaagttacagttgctttgttaaagtatattgagttggagtaaaaagttctatttggaaagatttcaaaacccttcaatggcagcccaatcattccgaagctgaattaaatgtaaattgtgaattatctgcatacgtttatagtctattcattttaatatacatacggtggttgtgtactttaagaagataaaaagatgattcctgaggcatcattactgcatggcagagagacaaacttgaaaacaagtaattataataatgcaagtgttaaactgaagatacagagaaggaatacacatattccacagtcactggttccctttgggaacatcaggaaaaaacagaagaggaaagttttgagttgggtctggaagaatggaactttagcaggcagaaaaggagaagaaaattccaagtggtaagaaaaacacagttaaaatcatagaggcaagaaaatataagaggctagaaaaccatagttcagtgtggccagggtgcccacaatgcaccaggagaagatagaaaagagattgtttatgcagcaatgagattggaaaggacctggctgccctctaaggagaagtttctattttatagcagcaggaatctaatagagacgttacacgaaggaatgacaagataatcgctctattttagaagattaactctggtagcaggagctgggatggctgggggtgtgaactgaaactgacgctgcataagaagagaatttacaagcccagtcaaagaatgaggaagaggacccaggtcagggaagaagcaagacaggcgatgagaataaaggctgcttcagaggtgaacactgtagaattgggggcaccaggtggctggaggcaggtgagaagaaaaggaagatgtaaagagaaaaatgaaggatgatgcctagtttctgatcctgagctctgtctggctttttttgcggggaagagatggagattaatgaattgtctttgggcatgtttagtttcaggtacttggaaatacaggcttgcagtttagaaaacaacttacagctgtagataaacatttacgaattatcaacatttgaggtagtggcaagtaaatgatgtttttatagaattatcatgtagttaagaagaaaacagttttaaatattggaccatgggccagcatttaagagaaagttaaggaaaaaaaaaagatttaagaaaaagacacacagaaagtcatgccactgagattttactatgagtcccaggcaaaggttttaagatgagtgtatcaatgtcccctaggcataaaaaggattaaaaagagaagagttcagatgacaatttggaaggcactggtaaactttgagcagtttaattagattggtggagagttggagacgagacagagtccttgaactgataaacaaaaaaaatctgagagtatttggtagtgaaagtaaaggaagggtcaaaagaaaggttttgttgttgttgttgttgttgttatggtttcttcgatagaaaggggaaagataatggttaattggggtaacccagcagtagagattggcagggcaggtaaaccggcaggataaaggaaggagagtatggattagattttaataaaagtttcttagggaagaggggaagaaggaaaaaaaatgagttgagaaaatatatattaaattctttacattgtgcttctgagacagagctatatttagcacccataataaatatatctgataagaatcctagtatgttgctgactctcagcactctgcttattattatgaaaataaaaatgacttccatgtcattctgtcagactatcttttggaaaaaacaacgacaacaaaaataaaaatgtcattcaatccgaaagcaagagaaaagacaccttagtaaaagtaactttcttcttccacctacaaaaccagaacttgaagacacaaatctcaggtgtactgaaataatttttttgtgcctggatataactgctttatgggatcacagagacttcagtacacactctgggacaaacagattattcacaaatgatgatccaaacatattctaggcattcaattgaataaggcccaggatcacccccagaatttttctctgggcgccaaagaatcctacatgctgaataagaccctaggcaagaccagagctccctgcaccatttgaattaggtagtttccatcttgcacctatgggaaagagttggagccaacccaatctttatgattaggcaggaaaaacaacattttccataagaatgtaatcttctgcatggttggtcaccagttatttgttggacatccatttggtttctgccaagttagctaattgttctgctaaatcatctttaaaagatgacttgccttcttgagttgttaatacttgtgaaattcttttcccaaatgaatgagaattgaaagacatagattcttttaacacacacatacacaaaattcccaaacatatagtgtgttgaaagttagtctgttgcaaagaaacttgagttctaggcccggatccaggggtggagatgactgtaacattccaccaagaacttcactcttggctttcacctcgaaactaaaaatccctagttaagtcagatatatgaagtattgcactctaacatgaggaggaactgaagaaaagggaggatgttttcataaagatttagtgaggaagttagaaggaattatgtgtgaaagaaggaaaaagagtaattgtggtattattacaatacatgcctgggccaggtacagaatatgatgggtccgtgtttcactccatacagccctgttatcatgatgacattatgaagtaatttcctatatactataatctgttttggaaatgctttctaccaggtgtctcttatggaacatacaggaaaaaaaaaaaaagagttgacctattaaattactctcgctgttcaaatatttgaagtactaattcatcactcatgacattcaatttatattttaacatcattataaatttaacagggttgaatctttcaaaataacaaagaaagtgccttttgaaaggaaagaagataggaacgttgaagaggttcttgtgggatcactcttaaaagccatcaaagcatctgaatctctctcttggctgtataataaatattcacagaaaatgaccgccaagtatgtatggagaaatgccttggcatttgctgtatgaatatggatgatgggaatatagtaaaatattagagagattaaatcgaaactcaaagatagttctaaggtgtttactgggtgtcacttgatgaaatgactctatggggatttatcactaatctgtgaagtgaaaaataatcttaatgacgagaggaagcttacctacattatgcctaggacaagaagtttttaattcccctctaacaatgcagtgtttgcaggttttcatccattatcactttgttagagtatctttgctaaaacccaactattttataggctcctctgacacctcacaagaatccaagggaggaaatgaagccaatgaatgtaatctacaggtgaaatttgcagagcaaattcaggaaaaaaaagtaattatgcttcttcgcattttatcattttataacctcaccttttagagaaggtattgagagattatactgattagtccagatttttattttacatatttgttcatggaaaggcttattttaacagaagttatatcaaggtgtcatgcccagtaccatcatcatcatcatcaaaaatttgactgaataaacctaagtacacacacacttctgtatgtatagtcttacatatgaaagtaatatttattcattcaccaaaaagtgtaaagagaggttaaaacaggatgggatgaaacagtgtacaaaggtaaggaaaagcttttccaagcaactgaatttcccttgaagcctgaatgttaagtggaattaggcaaagtgtggtggttgtgggaaaattcaggcagaggatatagctagtgcaaaggctctaaggctgcaaaggatgcaagctatgcaggcatggtgcaaggaggcctttgtgcaggaagcaaagggagataaggctggggtgacccacagcctccttcttcaagggcactggatagactcctgggaagcaaaaagtgactggattaaatttgcatttcaaaaagactcttctgactacagtatgtggcaagataattgggtgaagcaatagtccaggtggaaagctttattacagtcaaaacaaaaaaggatgaagacttggattggggtggtacttagtgaagaggcataaaagaagactgaagtcaaaatgacaggacttggggatgggtgggccacagaaagaaggtgtcaaaatgattgtcacagtaggtaattagtcattgattgatagaaaatggtaatcactgaactaggctttttatcttcattctgttctatttaggttcattctatccaaagtatttagtgcttaccagatgcaaagtacagttaggaattctaatggatagaaatataaaataaatggatacaaggttatataatctctgccttttataggcttatattcaaatacagacaatgctttccatttccagtaaagggaatgagaaattatatacccagatacatatatattgacacacaaataaacagatgtatacacatgtatgtctacatatgtatatatgtatgtacacatatgcatatataagtatatatatatttgcatcatatacacatctaaattaagggtgcattgccaggggactgaggaggataaataatgcagaggtcagaaaaaataactgaaaagttgtgtgggatggtattcttcttataagaaattcaaatgttttcaaaaatgattgtcttatatatctgccttattacagaagaaatgtatgacgttggccctgtttatcagggccagaagaagaaattcagcaatagtatttagcagtattaacaattttaatccatgatatcagtcatgacactacaatcctgacagtaatcttattaatagtaatgataaataatagtaatcattagtatgtagtaatttttaaaagtcacacaagcagaaaaacataaacatagatttgattttaatgttgtttgaacattgccttttagcatttttctttgaattctaagctcataattttatcataaaactgtctttacagcagacaatgactaattagtaattctattaaatatttgccaaatggagggtaccacttctagttttgccagagtgtcttgctggtcagaagtgctttgcctaataaactcaacatgcatgttgatgctaagagtctaactgaacacacaggacaatcgcaaatctgtgaattattaagcctcctttcacctcaatttcctccctcataggatggtctttgcttatctcagttttgtgtgtattccttttgattgcttgttaatgtctcctatttatagtgatattatgtaacagtattatttaatctccaaaatagtatacaattgtcaagtaccattgctgtaattatggtgcagatgttggaatatgcttggaatcactaaaagtgaatttaccataagctaaggaagcttactcttcagggactctgacttgcaagagcctatttaatttcttattacctaaatttgtaagtttaattttgcagtatttttcttttaaaagatcccccaaattttatgagcttcatttccagaaaactcatctggccttgtttttcatattgtattgtcatatttaatttgtttttatgcctttctcacaatattttaggttcatgagatcagagacagtattttatttgtttctctactgcctagcttattatttatttatttatttatttatttatttatttatttatttattgttatgagacagggtctcactgtcacccaggctggagtgcagtggcacatttatggcttactgcagcctcaacctcccagggctcaggtgatcctcccacctcaacctcccagtagctgggactacaggggagcaccactacacctggctaatttttgtatcttttttttttttttttttttttttgtagagacaggatttcctcatgttgcccaggctggtcttgaactcctgggctcaagcaatccactcatctcagcctctgaaagtgtaagaattacaggcatgagccaccatgcccggcctgtctatcacttagttcagtaaatgcttggtgaatgaatgaatcatatacatttagtggttgttttgaagttgactctgctgagtgagattttctttgcattcatgcatcttcattaatgtcaactttgttgcagtttttaaaaaagtaatctttgtttacattatcttaagttacttgatttaaaaaagttaaaagtgactatttgcagaattctaaagtcccattactgtcaacatgcataatattttgccaaaaatgcaatttgtcttgttagtcttctttaatttttccatgttttaaaacttttcttggagtatttcccaaatgggatttactgagaggatatattcagccagctttgtagattctaagagtccttctaaaagttaagtctagccaaggaaaaatgtagtggcacacgattgcgtttctcttacgctgtcatttaatgtgagatctaaattttgcatttctttaatgcccaaggtgtttattttttaaaatctgtactctttttatcaggagttatgttgacaatttacctgggagctgatataccctatataatacatgatctaagacctgaacaatacacaaattaataaaattaaaccattaagatatgtcatcatttctaaattatacaattgggttttttttttaaagcaaaaatattcttcctcttttctccatcccttgttctggtcagttccaaggttttttacaaatgcaaaagaaattcatttgctactcctgaccacagagatgaataatttaaggacaatatcaaattcttgataaatctcataaatgttttaactgtccaagaaatggacatttatttggttaatcttttagctggccataaataatgtaataaaaccccttaaaattaacattaaataacataaagacctaacgatttttagaaaaaaacctttttggactgagccttgaatttcctgagaattcagctacaagtgataactaaaatgtaactcgagaatctggatatggttccagaaaggattgttgtcatgcaattgccatttcatcatctttccttaaagtcccttcaatatttatcattgcaatttttgtcctgtcttttcccctccatcacatcaaaccaaggaaaaacaattattaaatgctcatttatactcacctccctcccttcatattcattcattcctcagccctaaaattcctgtaggaatcctgcttttacgttttatcttaaagccaccatagtatctgtaatctcttttgtagtcatgtatgcttaattttggaagactgtcaactacctcttcaggttcattcaaatgaaaatgtatcacaaaatcgtaggctcttcccctatctcactgaaaaattactctaaaaatgaccagtaagctgttttgttgaagcaaaacatccagaccctaaacaaaagtagcagaattacaacatttccatagaaatggattttgagcttcttttttttaattggggaaaatcttattttttaaaaaagaatcccagaatacatctttgctttcagtccttcaattctaacataatgccatgttagagaatatgtggtagtgtatactaagcccttatgctgtctcacatccttgggacaaaatatctgttttgaaaggacttctctgaattttgctatttcctgcttactgagcagtggccccctcctgggaaaacagagttatttcagccagtgttcagactccatcttgcatacgtctctgtggaatattaatagtgctactgagatatattcatcatcttttctctgcttttgctgtctttatagcccagtgaaatttatatttggtgtttgtaggaaggctatcagaagctacttggacatcaaacttttaaactataaataatgatggcaagactgctaggatatctttccacagttaaacccattcaacagagtttcgttcttatgacagtgcaaattaaactagaataaaattagtgtgattttaggacagttttaaagtgaacatatttccctccctcccttcccatctacatatcaaggagacactccagactgcacttttatttaaattgcggccatcagaaaataccgtgagaaggtagtgtgtaggtaatggttcagttagcattgaccccagaaaatggaaaaccaagagcaagtcacttttaaagtgaagcaatagattttgaatatggattgttccaactcaccacttcccgaccacaacacaagagtatttcactgtaaattaagagtctaagttaaccacagctgtggtataactctgagaatgttttctctacatgtagacaattctggatccttccgtggtgcccgttaccctggtctttaacttttgtcctttgcaggggaggggtcaatgccttcttatttccttgctctttagaattctccaccagagggaggacaagggaaggagtaggtttcacgcgcagttctgagtaaagtttgaatctgagaaaccccacattcacgaattaaggatctccagttctgtgtctttattctacccctccctgcctgcttttccactcggcagaactgagtgactttcagcggctgcagtaattttaattattctgagtcgtgctccgaactatgttttttatcagttcctctgaaaattaagttgtagtaagagacgtagtttaagggcacccccttagaagaggccaggttattttttaaggaaaagctgaagatttctaacaggcacttactaaacacacacacacacacacacacacacacacacacacgcacacggcgcagacccagcaggagagcgcaacctagcatctttaaggttcgcttagcccttcctgtgcacctggaaggaagccttatcttaaactcccttccacctagagtttattttcgcctgcgtgcgacagggcttttgtacttaagtgagttaaggaatgaaccccgaactcttctgggaaagccaccaacgttccccccgcacccctcccagggttcctgaccacggagactctgcttggggcacaggtgtgggagtcgcaaacttttctctgcgccgtccttttccgcgtggaatgggacggagcagccctcccaggcgctgcctggctgcggaggggagcgggcagcgagagcctcgggtctccgcctgggttcccgggtctccggggcgctggcctcggtctccgcgcagcgtccagcgacccctgtcgggggttcccggcagccgcgccgccaccccccgcccggccagcgcgggaggaaaaggggctgcgcccgggagcgccgagcccaggctcctcccggtggcgtgtccgcgcctcggggtgggggtgtggtggggaagagggagggggcgaggccaggggagggtgcgaaggaggcgcctgcctccaacctgcgggcgggaggtgggtggctgcggggcaattgaaaaagagccggcgaggagttccccgaaacttgttggaactccgggctcgcgcggaggccaggagctgagcggcggcggctgccggacgatgggagcgtgagcaggacggtgataacctctccccgatcgggttgcgagggcgccgggcagaggccaggacgcgagccgccagcggtgggacccatcgacgacttcccggggcgacaggagcagccccgagagccagggcgagcgcccgttccaggtggccggaccgcccgccgcgtccgcgccgcgctccctgcaggcaacgggagacgcccccgcgcagcgcgagcgcctcagcgcggccgctcgctctccccctcgagggacaaacttttcccaaacccgatccgagcccttggaccaaactcgcctgcgccgagagccgtccgcgtagagcgctccgtctccggcgagatgtccgagcgcaaagaaggcagaggcaaagggaagggcaagaagaaggagcgaggctccggcaagaagccggagtccgcggcgggcagccagagcccaggtgggtgcgcagcgcggcccgggccccacgatcctcctcctgctcctcctactcctcctcctcctcggatgccgtggcctctccctccccctctccctcgcccgtcctcttcgccctgcgctctgagcgcccgttgagtcgcgcggtgcttcccctcctgggggccgccgctcacctgggcgccgagtcctaccgggcgcctacgcccagagctcagggcaagggacagcagtcccggccgcaccctcccagagtcccgggagcgcttcgctccctggcacggcccctccccagcgccttagcggctgagcccagcccgggagtgggacctgggctataggagtcgaggctgcgtgcgcgcgtgccccgcgccataagcgctttgcacgggggccgtgtgccctctagcgggaaacgctggaatgggccgcctggagggagagccggtcccctcggtgtgcctggcagcgcagaagtgggtggtcgagcaagaggccgcgtgggaagttagcttcggcgttttggggcacagggcaagcgatgtagagtgcgcgccggttcatcttgattcagtcctgtgctacggagactcaagagcagcggcagggattcctaaaggtcagcgaagcagatgaaatctagtccagtgtcaggaatcagctctgccccaaacaagttctacaaacttttggcttaacagttctatttttcaagacctctgtgataaatatggataatttactttcccaagagatgtaagaaaacaaccgtttatctgaatttttgaacccaattgtttgctggttatctatataataaaatggcaattgaagctttctagaaacaaatcttgtatttcatcatcagaacacgagcatgaacaaaagctttaccttagatgtccctaggaagcgctgatgctttggacattaccttggacaaaagaggcatgtcgaataaatacttgtttatgagtgattggtaggtagctgataaaagaggggaggaaggagatgggggagaatttattttttgcctctgcaattcccaattattaattgatccagatgccttaagtcgcttcgagcgtacccccaacacacatttcatgaagcacttctgcagaattaattcactagtacttgataatactgtggctacagtaatactgtagaagtatttgtcccttgctggaagaaaacaaaccacatttgcttggtcttcttactggtatcactgatagcatttcagaacctgggttattggcagagaccttcagcagagttttgagcaaaacagaaattgaacagagagtaattgtttcaccactggccattcttgtgcttgcttctttaataagatcctgctgatcatattcacttcaattactgatcattgcccctcatgagggtgtattgaattttcccttatttttaccctatattttggggagagaccatagcactttattcaacaagataggaaattggggagctggattagttacctccctgcgtgactttgtctactgtcctttctaaggtcatcatagtacattacggagatttcagacctagctcaaatcgttgtaaagagttattttgggggctcttatcactgtttgtggttgtgttctcctgtctccctgctcattggcttcagaagaagtttctgtggtcctctgtagatggtctaatgaattaagaaggggccagcggtctgaagtagcatcctgttcaggtaataggtgtgcattttgtcaagggctcccagcagcagtaccgtaacacagcaacttgacaagttcagtgggggaggggcaggcatttctgtgccctccagatctcatctactaggtaggcagctgtcttgtgattagctacgctctcttgacacagagcaccagagcttccttggtggctctcatctgctttccagtggtacagcagtgattccctgtaaaccagctaagtcagtatctttaagtgacatttgcttaactgtcttccctgaaaaattggggtgaatttggctgtaggttagtttttagtatatttgtctctgttttccaccagattataatcttttttggggagggactttttacccccttcgaagcatcttgtgctttttaaaccagataagaatatgtattctttatttgattcagaaagaatggtcaacaacttgaaaccagctttatatagaagcacatggcattaaatacaatgcttcagaatcagtgtttctttccttctttgtcattttccttataatggtaagtgccagtgtagttttccttgtcttaggagaattcatacctgatgactataatggtttgtgagaaaaacccacactctaggtttcaggcattcccaaaggaacgacctatagatgccataactctagtattcacacttgccgtgccagcccaaattaggacttaggaggacaagtttctcttgtattgctcccatcttagtgcctgtcagttccaagtttcactcctttcttaaaacagccactgcaactgtctgtccttgatgatatgtatgcaatagccaagcctctcttcagctgttttaacattgcctcatgacagtcaggggagagataatggggtgggatctcagccactcagccccgctgtgtgctatattgtacgcataggcataaacacatctgttggagggaaattttcagggggaaaaggcttctttaactttcatatggcatgagtgactgatatgcgatacatacatggctatttcagagcatctgcacttttatacaattaactaaatgttgaattgcacactattggggctgcagatgttcaacacaattatctattccataataatagctctaataggtcccaagcccttggagtcattgattccttttctttgctcaaaataagcaagctaagaatagtcttgggtgctgtatcactgatccacgtaccaagagccctgtaacagcctgggtctccttggtgctggacctcccatatccagcctcttcatactgattcagctcaacagactttttctcttgaagcctgaattacaaaaccagagcttttttttttttttttttttgacggagtctcgctctgtcgccaggctggagtgcagtgggtgcaatctcggctcactgcaacctctgcctcctgggttcaagtgattcccctgcctcagacttttgagtagctgggactacaggtgtgcgccaccatgcccagctaatttttgtatttttagtagagacagggtttcaccatgttggccaggatggtgtcgatctcttgacctcgcaatccacatgcctcggcctcccaaagtgctgggattacgggcatgagccacggcgcttggccgctttttttttttttttttttaatttttggccaattggtatttgactctaagcttcctttgtgattctctgtcgatatgttgttcttactctgcacctctgcacggaattctgtcttttttctttttcctcttaaataacctgggaaaaattcactatcatgcctagccagattctagaactatcctgtctcccttcactcctggtaggaggggcatttgtgagtctgggtgatggaaacattgagaaacctagtatcccaaataggtagaagcaggctgtgtgtttccccaatgacatcacccacctgtttccctcactaagtggctctgcaggctgaagtgcttgtaaacattcttgcgtataaagtaccctgaccctaacggggcagcctgtgtttacagaacaagaggaatgtccagtgatctgtttcaacctggttacttgtaaccacctagcctatgtaattattaaaaacattaaagattattcacagaatgaaataggacttattttgcagaattaaaatagcaggaagagcggaagaaagttgtatattcagacatgaatacttctcatacccatgaaatggtcagataacactaatgaaaaagaggagaaaaaatatatatagagaaccaaaaaatattagacaaacatgaacactgaatacctactacatgccaggcactgtgctggacacttttatgtttattaatgagggacctgctatttattgaattcttaccatgttccaggcagtaaaacagatgtatattgtgtattttgtcatccgtcctttcgaaaataagaaaattccttgctattaggcagcaagatgccagatggcctagtccttagctcttcagccagattgcctgggtttaaatcctaattaggctgttccttaaatatgtagtcatgggaaagttacttaatctttctgtgcctaaatttcctttttctgcaatatggggataataatactattattattatcatgagggtttcatgaagcttaaaggaaataatccatgaaaagcactctgaacatcaaccaacatgtaataagtgcccagtaatattagctgtctttataaaactacttaagaaatgaattatctgtgtctttgcaaagatatttgatataatttccaaaatttaccttttatggtaaaaaatatccaaagctgacctcagattacagtggttataaatattaatatgtactacctgtaaaactagagaaaagtggataagagtgtcaaattccataactgcatatatacattatgaaaacagtactgaactcaatctaaatattgaaagtagagtgaggtgcaacataattttatctctggcagaaaaatgttgaggtttcaagctatgagaagattttgaaacatgactcttttttctggcaacacttaagagttgatgcttaaacctcactttattgtatagaatacataatcttctcttttgggactcgtataaattgcagcaattgaaaaacaaaagtgtgcaccaacctgcccctcactatctttttatcaagcataacagtatattgccagcaatgttcatagaattgagtgcaggtgtttctaaatataaacaaaataaggaatatattaaattcacatttctagttttttatttcctcctcagccttcctagaatggctataggtagtgtttaaagttctggaagtgtgatagattcttaccaaatcaatgttctgttagcattctccaagtaacaagttaaattggatttgaacagtactgatagtttatcatgttctgttaggatagatgaaaacaaaccaaatgccagtattttgggtgagtcactttatttgctcaaagacgcaaatgaatgaacttctggtagtttagttaaccctggagctccccctcttgacaaatagaaaaaacaaaaaaataaatcagatagtattagcttgaaaacggatttcttttacccagataaaaaatatgccactaaggtacatacaatgaagttttcttgaaggaactaatgatattttggatttctcctaattttgtgcatgtctgcacttgtgtgtgtccttgtgtatgttttaatgggttaaaaaaaaaagcgagctaccaaaataccaatagatgtcagtgtttgtcgctttagaaaaagtgaggtgttagaaaaaaagaagaaatggacagctttatttatttttggttttactaaacataaagctggctacttttcaacaattgactaataattcactgtatataaccctgtttacaaaagtacattttattaaggaaaatattccatgttctcatctttcttctaaatttttttaaaaaagcctctgcagtaaattcccaaaagaattcagaatgtaggcagaaaatatgttaattttttaaaattaggaaacaaaattatttgagaatgtcgttaacacattagatttcttttgcatttttaaactagaaattagatatgcactttcttatgttgccctgattatgactgataaagtgcatttttcagtccaagtcaagtgagatctgtggagttctgcctctacataagagcagagatgatcagaattctcttcattcttcctatgccccatgtcacctttttctggcctccagagggtgctccaggagcatcacactgctattccccaaagactgcttttttcttctctctctctctctttttttttttaagttactgcagtattctgggcaatctactggaagaacagagtcccgattccatacatgttagctgcctcaactggagtttgttttccagctggaccacatagccctaattcattaagtattctaaattagaatattttaaaacattattctgatgatgttgatgcagtggttagcttgcaaggggacatctgtcagattaattccctctaggaatttcccccaagagaatcaagcatctttaaataccttccaatcacgccttacaacagctccctcccactgaagtgcacatggtacccacaaagagatttagtgctatttaagagtttcactctggcattggaaaactataggtgaaagcatcaaagttggacaacagatctttactaacacatttgttttcatctcttcctatctctctgtttcctcaacccaggggcaacaaatgtttaggagccccactttgattgagtgcacatttttgaacacaggtttgagtgactaattcttgtggatcatgggctgattttatttatgtactttttttgagacggagtctcactgtgtcacccaggctggagtgcagtggtgccatctcgactcactgcaagctccgcctcccgggttcacgccattctcctgcctcagcctcccgagtagctgggactacaggcgcccaccaccacgcccggctgattttttgtatttctagtagagacggggtttcaccgtgttagccaggatggtctccatctcctgacctcgtgatccgcccgccttggcctcccaaagtgctgggattacaggcgtgagccaccgcgcccggcggggctgatattttaatatggtcacacaggccttgttatttatggtttacctgcttatgttaattccaccctgtacttgttatctttgacatgagttactctcaggatattactccccttccctttttaaagtgtaatattgttcccattgtttcttgctccaagaaatctgtcgttgatgggaatagtctttgactgccacagtgccccgaacctttcattccacagctttgatgggcagggagctgccttctctgggcagctgtggagttttactttcaatgatatgagagtcacagaatgttttattagattgaatcatatgaaattgtcagttttgtaggtcatacctggctgaatattgtccatgtcatacagtttaatatttggactttgaaaaagtaatttgactttacttattctttacatattctttaagtaataatgacaactttgaaaaagaattatgtacgtttttgataattaaataggattgaagtaatacataaaagaaatctgagctagggataattgaagcagtaacattttttacaaccaataaatcagctaaaatcatatccatattaaatgaatttagcataaaattagaatgacagagcaactagcattttcccttggtgagaaaagtagtaagtttccaccataaaatatgactcatttttatttgacctattagcagatagttgttattgcaccttatcttaaccaccattatttctacagagagattacagagcaatgagtaggaaatatggaagattgctgaataatcctggctttagttatggagtaatatgaaaaaaggaaaagaaaaccttttgttcactttcacagtactacatcaatgcaagctttttagtagttttaatgtatgaattttatcatcaggtgaaaatgcatctcattattagatggcctattttataaataaagttcaaatttcgatatagccagtttttaaaactgtatatgtttataactcatccctttgttgcatataatctcccaattttagagacttacattgcatttttaaaggatagcacagtctctttagcaatcccacagggaatctaaaaccagcctttacaaggagatgtcaaaattccaatttgcagtgatatttttgtcaaaacaagtaacgtgtgttattacgtatagtaagttaacacaatttttcatttgtgtatcaagtaggcattggtttttgttttttggtttttggttttttttgagactaagtcttgctctgtcacccaggctggagtgcagtggtgcgatctcagctcactgcaagctccccccactgggttcatgccattctcctgcctcagcctcccaagtagctgagactacaggcgcctgccaccacacccagctaatttttttcgtatttttagtagagacggtgtttcactgtgttagccaggatggtctcgatctcctgaccttgtgattaacccacctcggcctcccaaagtgctgggattacaggcatgagccactgcgcccagcaagtaggcattgtttttgtgtgtacgtatcaaatctgtttttatatcttttggtattttatctcttttctgccaacagggtgaaatggaagtacagtattgggattatgcacaacattttattgtttaaaattatagtattccttttccattctgttgtttcagttgtttaaaaataagtaacaaaagagaggggtctgtcttgaagcccatgagatggtagatctttagaaacagttataatagcagtcatattgaaactgattgtcatctatttctgggaaaaatattgaaggctggtatattgtccccagaaggattagatgaaatacagaaaatagattatgattataattttttttagtgaggtcaccttgctgtagagttggaaccttcccgggggattgctcatgcattatccattttgggaaagagtaatacttacaggcattatggaaatgagcgggtaggtttgtcaagaggaaaccaataatttgaatactgagttgaatggaaaatgaaatacatgattttccatatattaaattgaatagaaatgggagacttatgtcttgagggtttttcttttctttttttgaaacatgttgatgatattgtgtgttcccaagtgccctcaacctgacaggaaggagaaatgtcaatagaaatagttacttattatattttgatatttagaaaggaacagtggagttttaaatgttgtgcatatcatttatgccccatccaaaaggatagcgatccacttaaaagaaggcagaaaagacaaggaccgctatcgttctccaggaatcaacagaagctaagggagagcgtagagtatagtccctgtggcctctacggagtcatcgccttctcagactgaatccacacaaggccgccttgactgaaagagcctctacattggactgtgcatggcgtggggaaatgtgattacttgcaatatgctactgattacagaataaatattatgcattcggttttcactaaacttaaaaagcccagtgaaaaccccacttctgcatgtggtgaatgtggttatgctgtgtcaggtgaagacatgtttcagtgccttcgtttactttccattaagatatgctgatttccttctcccttatgaaatagaaaaggaaggacataaccatcctgctgctctgccctgagtgcaccagtataggaataaaactctgtaaacagagggtggtggcaaccatctaacagggacctgcatttggacctgtgtgtttgggagagccgcaaagtggctgtgcctctgatatcacaggactctatgaaagaggcaaccaaagaagacctgaggctcttcttgtcattttagatatgtgatttcataaagttactcttgaccttaatgcagatggccatttgggatttgtgtctgtgcatttcatccacagctggatggcatagttgctgagtaatcctgttgctctggagcaatgtaagttacagctgtggccaggcacgtggctcatgcctgtaatcccaacactttgggaagccaaagtgggagatctcttgaactcagggattcaagaccagcctgggcaacacaggagtcctcatctctactaaaaatccaaaaagttagccgggcaaggtggcatgtgcctgtggtccagctgttaaggagggtgagatgggaggatcacttgagcccaggaggttgaggctgtggtgggcaattatgatacaccactgcactccagtttaggtgacagtgtaagacttgtctcagcgaaaaaaaaaaaaaaaaaaaaagttaacaaccatatcaaaagaacaatttattcaccccccaaattgtcttggaattctcacattaatttacagagagaaataaccctttggaaaattcacaatgttttgctagtattagtatgtcatctcactctaaaatgtaaaaaaaaaaaaaaaaaatcactactcagaccttataagaatctggtttttgattatgaatacagcaattcttttttgaaaactcccttgacaaattaagccaatggtggacattctaataattgtcatattttatggtacatttgtaactaaaagcctcttctttgggtaatgactgatagtttcatggaagaagtcattctttttctggtcactctagaaaataagaaatgggaaatgattgtatgtgatatacatatgcatggttctaagtaccaaatttgcagattgcctgaaaatgttcttatgtactttttatggatacaggctttcttttcaattagattcaaaaagtatcaatacattattatactttaaattgactagagctaccttttaaatggtcagataggttttctttttaaagaattacttttgtgattactagccacctgaaatggtgtttcaaggccatgcatggtgcctcatacttgtattcccagcactttgaggggctgaggtgggagcatcgcttgagctcgagttcaagaccagcctgggcaacatggcaaaaatctgtctctacaaaaaaatacaaaaaaaaaaaagaaagaaaaagaaaaaccattagccaggcatggtgggatgcacctgtagtcccatctacttgggaggctgaggcagaaggatcacttgagctctcagaggttgcagtgagctggaatcgtgacaccacactccaggctgggtgacagagtgagaccctgtgtcaaaataaaataaaataagatataaatgaaatagtattttcaagacttggtataaatgcatagctgttaagctgtaaggacatcaataaatgttcataaataggtaactttctacattctatcaccttattttctataatacagaaaatatactttaaattattttatttatctgagtccttttattctttttgcttttttttttgtttgcaagaccaaagtcagagcaatttcaattctattttgagcattttattttggcactcatgtattttaattaaaaaaaataaataaaccattgtcctcagccagaagaattttctgctgagtggtcataaatgcagagtttagcatttcacatctctagaatgtaaaagccacaaagtcatatctgtcttttatgttgtcatatcaccaggtgccatcatggtgctgagaacatagtctttgtttttaagaatttattcagtaactgactgaatgaggaagtatggctagtttgcttaagacattgagttgtaggagttgatgggtagcagtttagttattatgctactgtcagttaataagaaagtatgagtgcaattcagcagtatcagtgatgcatggatttgttcctaaattgttatttttgtggttgaaatttgcactgtttattttgaagctctctgtgtaagtcataatcagtgcttaattattcagactaatgaattggaattagaggtttgctcagtccacaattcttgctaccattaaaatattttgttacatttgtttttgagtacatagaagcaactaagaaatggattaagatgctgcagttaatctttgtaaattactatggccattgcctggcacctaatgtttgctatgttaagagtttgttatatgaataaacgaccgctgttcctggtaggtaatgaaagtaatcttaaacaatattagtactgcctaaaaagtaaggtcttaaatataactacagtagtcctgagaaaaatcatagagtgttagaactgaaaaggttgtcttagaggtcatctgctcgaatctcatctttttagttgaggaaaaccacaaggtacaaacaacaagggcatcaatcctagcactagaacccagatctccagatttcagggtaaggattttaattattaccatgctatactttcagtctcaagatggcactatatatgaattcagcttcacttttatagtgctttgggtgttattatgcttccagataagagagatgtatttctgtgccattgaggaatagcttagagtacctatgattcataggaatttgaaggctgtaaatcaaccgaatctttatatctttttgttccttcttgcagtatcttgtacccaagtagcttcaataaattttgactgacaagatgaccataaaataagtagtcctaatgtcataacatggaaaaggagggtaatgggtgtgtgtgtgaatgtgaattagtatagtatagtaatgagctgcctcagcgctcttaaactttttttagcaccaatgcctttatgcaggaaactctgaaaacaagcaagagatctttgtgggctctctgtaaattatgtgcatgcaaaaaagcatcctcagtgcttgtcccttgacagctgctctgagaccactgagtcactcgcttgcatctgtgagccactgaccagtcactgattgcagtgacagtttatcactaacaacctgaattatctttgacccagagacccaggggtcaaaggcctcctagtccattattaaatttccagggcagtagttcagtttgcattaggggatttgtttatatttatttatttagggtttttggggggtggggggtggaggagcttgggggaatgagacctgcagttattttccccacattataagattatttagtcctttatttgtgggatttggcatcctaaaagaaaggaagactcaaagtattgtggttctggtctgggcctcacatgggtgtcctaaagatttctgggacccatttatgggaagaatgccactctacagattatagcagggaggagctttgccctcaggaagacacagatcctttgagggtggtagagactcctaaagtctgctgattcatacccagctggccccattaacaagagaattaaagagtggctagaaagggactgaagagttcactgggggcccatccaaaaagctgggggtacagacaactgctgattcccagccagtcatggattttattttgagacaggtctcgtttggtcgcccaggctggagtgcaatagtgtgatcatagctcactgtagcctgggactcctgggctctagtgatcctcccaccttaacctcccaagtagctgggactacaggcatataccaccatgctcggttattttttttttaattttgtagagatggggtcttgctatgctgcccaagctggtctagaacttctgggctcaaggagtccttccaccttggcctcccaaagtgctgggattataggcatgaaccactgtgcctggcttgccagtgatggattcaaagtcgcctctgggttgtaaccaggaagcatgcctgggccagactgagagggctgaaggatgacggcatggtttcagtgtgtgagtgtgcatgtatgtacgtgtgtgtgagaatgtgggtaagtgtgtgagcctgtaaaagtgtatcatgagtagctgtctcttgggaggagagggaatcaggaaccttggtcaaataacaccatgtactggcatggaaaggcactgttctgggcagcagtcaagaagacagaggaggactaactgtatatgatttgggcaatcatttaaagtatctgggatttatttccttgtctaataattagcaaggttgatgtagatgaggtataacaactttaggggtagaagaaagctatgattcaaagtcggcattttattagatcagtggtctctgatttggtgtgatgtgttcctggtatgttttcgcttagaacaaggttgtttaacccatggcccatgggcttcatgcatcctaggacagctttgaatgtggcccaacacaaatttgtaaactttcttaaaacattatgagcttttttgtgattattttttccagttcatcagctgtcattagtgttagtgtattttatatgtggcccaagataattcttcttccaatgtggcccagggaagccaaaatattggctcacttagagtctttagtagtgactatgtttttagaaagcctaaggtatttgaagaataatagtcacataaagtctaggcaaatagcaaatttgttttatgtaggaaacagcttatcttctatagaataacttttgatgggtgaaattgtagtgttaatttatcttagtgaacacctagaagatttgtttaggtatgtgaattgtttagtgaaaatgtagaagatggtaagtatatttgggaattactagtgcagaagccttttattaaattctcaatagaaactgggtactggttatgaattgtgatctctcagatacctttaacttagtcgtctctcatgagtatgtgatacaattgaagttgtgggatttaacctctgctgagcagcagaaagatatgaagcagtggaaaatacaggctaaacagagcctttcagaataatttttcctcagtggtttatgttcttcacattcagtttttattcttctccatccttaactttctatagctgatacttccattttggatataggctctgtttcatttccagaggtatctctttccctaaactcatcaagtactttttcaaccttgttgatcatcttaacagaagaatcgtaacattaagttgatttatgacaccatatctctgtagtaactctgaattgtcatcaagctattcattgaaaggatacctcttaaactttctattactaagatccccaaatgtatctattctcctctcgataaaatgagtattgtcttagacaagcagcagactgctttttaagtgaagtggattaagctgctgtgatcgtccctgtgaatgtgtatgataaatcattttgatggcctttttaaatcagagtcaccgagtcccacacagagaaacagagaatgctgtctgtcattattacaataataattaagcgttggctgataggatataaagtataaatcaaagatcttagaggaaatagatgaaagaaaagctttgtttctcaaaaacttaatctaaaagaagaaatattgagcaagcattgggtgcttcatgaatggcctaaaaatatatttaagtctatcacctggaggttcgttcatttattgccaggaaagaatcaatcccacttttttttctctttccctgtggctcaactccaggaaggtgttttaattgattggtgggaagattttaacacagacaaaacttataagctaagcatcattatttctagtacagtggcttcaccacattatagggtaataaagttaaaagctgccgattgtttcagaattattttcagaaatttacatcctctttattcctattaccttgagaaagagttcagagaatgggcttagtcagcatgcaattatggtattagataaagcatacagtttggtctaaaaccaagatgcagctagtctcatcagggtactttaatcaatcaagggttgttaagaaggtaggaatgtcagtctaacttcattcctttgaaggtgatcagcctttcttctctggaggctttgaagattttgtcctatggctgggcgtggtggctcacgcttataatcccagcactttgggaggctgaggcaggaggattacttgagctcaggagtttgaaaccagcctgggcaacatagaaaaacaccatcttcctctccccactaccaaaaaaaaaagttagccagttataatggtgcacatgtgtagtaccagctacttgggaggctgaggtgggaggattgctggagcccaggagtttgagggtacagtgaaccatgatcatatcactgcactgcagccagggtgacagagaaagacccagtctcaaaaaaaaattgttctccaacaaatcttttttgaagttatggcatttaaccctgcccaccattcccattcccctgtcagtttcactatcatgcattcctttttctttatcccactcaggaccattgggcttgtcaaacatataaattggctttcaggaaaattcttctccatatctcttaaaaatttcctgtatcccattctcttccctctttttggaattttctttttctataatttaaagatagagtcttgctgttttctaggctgctctcaaactcctgacctcaagcgatccttctactttggcctcccagtgttgggattataggtgtgaaccattatgcccggtctagaactttaactaaaagtacgttggaccttctttctctgaacactggttctttttacttccctcacgtttcccatcattttgtttcactctcccgctgtatctcttttgaagttatcttccccttcactcattgactcttcagctatgtgcggtctgctgccaaaaccatccatgaagtttttcatttcaaggactgttttcccccctaaacctagcagttttatttggtgccttttcaaaccttctatgttgtattttatattttcaaggtccctgtagatatttttcaggttgttatttatttcttttagcagagtaagcctagttgtttcataatttctgtgtggtaatttcagtttgtgttggttctcactctctatgccttggttccttctgtgcttgatggttggtctctgaccctgtgttggccattgctctgtaaaaattatctgtgtcattcctcaaggcatgggatagaagcacattcctgccgagaaggtaagtgttactgctgggtacttggaaacttaccgagttcgtggcttgaggttctgtggcctaccagcctgtgcacacctaggcatgtagaaacctgtcggtagactcagcttttccctctggctgaactcaggatcaagacaatgtgtctggccggacacggtggctcatgcctgtaatcccagcactttgggaggccaaggagacgggtggatcacctgaggtcaggagttcgtgaccagcctgaccaacatggcgaaaccccatctctactaaaaatacaaaaattagccgggcctggtggtgggtgccaataatcccagctacttgggaggctgaggcaagagaattgcttgaacctgggagggggaggttgcagtgagccgagatcacaccacttcactccagccacagaacatctcaaaaaaaaaaaaaaaaagacagcatgtctttagttctctggggctaaatgggtatgtttagatttggtgtagcttttttggggttctttactccttttggggtcccagcttaatgtgaagagggtctactctaagactccccacttcaggaagatcctggagcctctatccctttctccaggatgagcaaatgcacttgaagaaaaagtagttgctttgtccaggtattttgcgtctatctctaaggtttgagatttgccttagaatttgtccaaaaaatgatcttttttgtcaaattcttttaaggtgatgtttattatatttcattcagcacttttaattgtttccagccaggaggttcttgtgagaaacttaccttccaggaatggaagaggaatcattagtcattaaggagctaaaaatgttaggaaaatattaatgcttcagaaacaatttgttgatctgaagagtacctaagttagggattttcagaaagtagcattttgttttgttttgttttgttttgtttgagacatggtcttgctctgtggcccaggctgaaatgcagtggcgcgatctcagctcactacaacctccacaaacgattctgttgcctcagcctcctgagtagctgggattataagcaggcaccaccacacccggctaatttttgtatttttcgtagagacggggtttcaccatattggccaggctggtcttgaactcctggcctcaagtgcccacctcggcctcccaaagtgctgggattacaggcatgagccactgcacctggccagtagcattctttggatgaattgactctggttttgttagccttcagaatctaaggaagtttatatctggtcaattttgagaaagaagatctctaagaaatgcctcaagtggggaagggatggactttataaaccaaaatgtcaatgtgttaatcctaaatatctcaatgaaatggggcaaaatatggctaagaaaaatttgacaaggtgtaaatctcactgaatgcagttgctgtggttgctaccaagtttacaagagaagaaaccaggttttgccaatgcatcaaaaattagattaaaaaagaaatttctctggcctagtctgatgcttagccttcaagagtaaaatgatgtgttgttagatgacttgaccaaagtcccatagccaaggcagggagagtgttgcagcctggtggtccattatctgatgccactggatctatgtagatgagtttggaacttcactttctgccttgtctgggacgtaaaaactttgggtgcccctcacttcttttttatataaactgttgtgttttattgccctggcactcttaagttgctgtttcaccctagcagtgcctgcttcaagccatcaccaatgaaagtgcctttgaagtgtcttaaggcgtgtgcattgcctagacaaatagttggcagaagaggtcaacacaagcgtctttgctttggagtgtcaattgaagaaattgtttttccacttgaattggcagtgtgtgctcttactgctgttagagttctgggcagagaagtagatgtgataattatgaagggagaagggggaagaacagctgcagaatgcagggaagtgactggactccagtaatcatatttggcaggtcaagggtgagatttagcctgatgggatttggaccattccctgggctagaaagtagtgttaaaatcaactccaggtgtttccgttattcttaaggcctaagtattattaaagcagaaaataatatggttaggatatgaatgggaggggattggtcattcgctgcttgggaatcacttatttgcaatagagctcattctctcttgacagttgctcctacatgtctaaaatacaccataaatctcgaagtgctcgtttcaatattgaagtttcctccaagtgagctgttatcacttttgtcttcaagagaatgctaactcactgaatctctttgagctttttatgctttacactgtggattttggagtttgctttggtttttccactagttctttaagttaaatttaggtaaagaaatttaaaatcatcaggcttattcttaaaaactcaagtattatcaaatgatggatgatagagatatgctttgggaatatatccaagtacttcaaatgatagaagttagaacaccaggagacatttagtaagagattcttctgctgggtgaaatcaacatcaacatcacctggaaactcgtgggtagtgcaaatcccctggcctcaccccagagctcctggaatgaagctgtccgggatagggcccggcatcctgtgttttaataagctgtttgtgggattctaatgttcgccaaagttttaggatcatgcctgcagagaatcctgctcactatgaaagtttgcatgcctgagtaagtcaaaagagatctttgaaaatagtatctaggtttgagagacttgctgtgattgtataattttagcaaatgtgtcaaaacaaatttttacttgcaggcaatatcttgttagtacagagaaataaaacaaacaaacaaagattataaataagaacaaaagtaattcatccaagagccatgtgaaaatgaaaatccttgaaatggaaaaaaaaaaaaaagtttttcagactaccctgtggaagtagtaagttacattgaaaggccgaaatcagccaagatcattttttgttgttttgttttttgttttttgagacagcatctcgctctgtcactcaggctggagtgcagtggtacgattttgactcattgcaacctctgcctcccaaattcaagcaattctcctgcctcaggctcccaagtagctaagattacaggcgcacaccaccacacctggctaatttttgaattttttgcagagaggggttttgccatgttggccaggctggtcttgagctcttgacttcaactgatccgcccaccttggcctcccaaagtgctgggattacaggcatgagccaccgtgcctggccaggccaagatgattcttgaagtgtgtgtgctgtgcgtactgtgtgtgcatgtatacgtacatttctgatggttcactttagtgatactgtagttcagtttatctgggattgcctcagtagaaagctatactcttacttgtttaactttctgtctattttctcctttaaaaaagaaaagattatatagtagacttatacttggtatctgtctgaaaaaaattatatgaaaactgtctttattgccagggaagcacttgtactttcttttctcatttattcttttctgcactttaatattacagtttatttgcttctggctttctttcataatttatcagaaatacaggcttgtatagaaatcaccattttttaaataaaattttatttttattaaattattgtgagctcattgttttttaaaacaatcatacacaagtaaaacatttaccttgggggtgggcatcagttccttttcccatccgttttcatctctagttttctttcctaaaaacaagccctctcaacaattctagttaattctttttctgatagttatcttttttttttttttttttttgagatggagtcttgctctgtctcccaggctggagtgcagtggcgcgatcttggctcactgcaacctctgcctcctgggttcaaccagttctcctgcctcagcctcctgagtagctgggattacaggcacacaccatcacgcctggctaatttttgtatttttagtagagacgggatttttaccatgttggccaggctggtctcggactcctgacctcaggtgatccgcccaccttggcctcccaaagtgctgggattacaggcgtgagccactgctcctggcctctgatatttatctttatattttctatataacatgcatgttctgctgtttcttttttaaaaaccttttattttaggtcttataggaagcttgtgcattcatttattcaacacataattattaagtacctaatacattctgtacattgtgctaggttctggaaataaacagagaatagaacagacatgattcttatccatggagagcttatattctaaagatgctaggaagtacttttaaataaaactctgacttatatataaaaacttcagaaaagaaagggcctgcttttaaatattttttttggtgttgtccactacttgaacttcatcaagttcatcagaaaaaatttaaatggtatttctaaataagtggtttgctccactctatcattaagcttgttaagatgaataaaaatcagaatattttcaaatgtatgtaaatacatacattcagtgtatttcccagcttcagaaagtcctaatttctgaaagtccttgttatcaactcttgttttgaaaggaccctttctttaagataaagtgtcacatacattattttgtattgatacaaattattgatgattatggatattttaggtaatcaatactaagataattatgttaatatgaattatgattatagggtattggtaacagacaggagtgtaggtgaatgatatgaatttgcactgagtttgtcatgcccagaaagttaatctgagccaaatttctaaaaagtgccttccttattccatattatgtatgaaagaagagcatagtttatgtgtgaatatatgggcaacatgtatatagatgtccacatgaactgcgcctggttaggtcctagaaaagcctatggtgggaaaggtgggttaagaggattgaagttaggagtgaacttgttatagtcttcataaatatttttatagccagtaacataaaacaataaagacagtgctccaaattaaagatacagcaatgacatgacatctacatttgaaactagtaataatggatgccgggccctattactaatttctgcttagcattccttactcaccagaaatgttttaggatcttagttcctttgcagcttgggatgcttgtaaattcacttgttcttttataaataatgtgcatacaaggagattttcaacagcattttcttatcaaaggtctgggcctatagtcaaatagtcaatgccatcgtggttttacagcacccatgaggaggtgttgacgttcaggttttagcttcaggattttgacttgtgtcttcttcctgcttgggtcctgtctcttcccacctccccagctcagccttcatgtacgaattttagattcttttgccttcgtatcagccagcagaagctagttttttgttttgttttgtttttttcaaggcctaggtttccttttactcacatctttcttcaagctttatttgcaaacacctccattcctcttgccattacttttgcttcatgtctatttcaaaactctgtttcatctttttcttgttactaccaataggagtaaattgagtgacttgcaattaaggtacaacagaagcagaattttcaaagttactcaaaaggaataggtagaaaaattcccatggtaagacaactcagtaaataattacatacaggcagtgaccatatatgctcattttaagttacaaatatacacacatggccataaaaatagtcagagactgagctggaactcaatccgtaaactgattccaaaccccatgtaatttttatacacagtttattgctagctttttgtccttttatgttcacttttatgtcctatcttctctatattcctaagttgcccacattttaaaatctgcctgtcttctgactttttaccacaagtgtttttttctcatccacttttattattctcatttcctgttttcaaagaaacaattgcaacacattttagaaatgcttacgacataagtggcacactcctgaagtctttccaaaatctattttcctccatgtcttaatttttgaaatttatatacttagcttctttctgctaattcccacagaaaaactcagcacaattttataagcaatgtgaatgatcttagagccctcataggaataaattgcacagaatgttatcaatatatcataagtgaggtacaggattaattttctaagatatcatttaaaatttcttctattgttactatacacatttgatttattaagccaaaacttcattcctctaagaataataatcccgtcacagttctaatcctagcatagtgtcgtcttaactgcaatgtactatcctaactttcaattacatcttatttcagctttctttattatacagtagctaaaaatcattgatagttataaagaccataatgccataacctctcaaatttaaacaggatagaatattttatgttactaatacagcaacagaggcattttcctctgttgggtagatgcaattattcagattccaagtggttgagacattccataattatgtctctaattttacattctacaggcctcatttcctctgtctgataactgtcctcacccaagggtttctacaaagtcacagtttgggtgaatctgtcatctcattttttcaaagaaggaaatcatcatcaaataaaattatacacaccaaataaataaatatcaaataatatattaatctacaaatttgcgacatatttattttctgactttgaggttaatttcgccaccatttttcctaatctgtatatcctatccccacttgcaaacaatgttttgcctgaaccgagtaatggcaacatttatcgtaagtatatcttagcttcttctccttatctgaatggggttctagttcccttagcattctcagataacattctgaatattctactctgtatatccagtttgttcatagacctcaaaatgcagaccctgcatggattattcccattctgctgtctgtctttatgaaacctgccaatacttattgctagatgaaattctacagatgttccatgatgacttattgactcgataacagggatctgcaaacatttctgtagagacccaactctgcagttgtagcacaaaagtagccacagacaatttatgagcaaatgaatgcaagtgtgctccaataaaactttatttacaaaaacagatggtaggcaggatttggcttatgagccgtattttgctgacctctgctctataatattccttgaagagatactattatcccaatatcctgacataaaatatatatccttaccatttgctgtagcaatattcaatttttctttacctggcgttgcttatgttctccagccagttctgtcttttcattaggaatctgagttaggatttcttagaactatgtatttgggtaagtttatcaaaggcctttttatttttattttttattttattattattatactttaagttttagggtacatgtgcacaatgtgcaggtttgttacatatgtatacatgtgccgtgttggtgtgctgcacccattaactcgtcatttagcattaggtatatctcctaatgctatccctccccgctcctcccaccccacaacagtccccggtatgtgaaattccccttcctgtgcccatgtgttctcattgttcaattcccacctatgagtgagaacatgcagtgtttggttttttgtccttgcgatagtttgctgagaatgatgatttccagcttcatccatgtccctacaaaggacatgaactcatcattttttatggctgcatagtattccatggtgtgtatgtgccacattttcttaatccagtctatcattgttggacatttgggttggtgccaagtctttgctattgtgaatagtgctgcaataaacatacatgtgcgtgtgtctttatagcagcatgaccttttaaagatcttaggagcataatgctgtaacctctcaaatttaaacaggatagaagattttatacattactaatctggttgggtagatgcaattattcaaattccaagtgggtgagacattccgtaattatgtctctaattttacattctccaggcctcatttccctctctcatttcatcaggtcttcaaaaggcttttaataaacttacccaaatatataattctaagaaatctcaaattcagtgcttgatcagatcactgtgtggtatagtttgtatatttttccccacccaaatctcatgttgaattgtaatctccaatattgggggtggggtctggtaggaggtgactggatcatgggggtggatttctcatgaatggtttagcaccattccttggtgctgtcctcatgataatgactaagatctggtcattttaaagtgtgtggtctctctctctttctcttgcttgctcgctcctgctttcaccatgtgatgtcccccactactcctttgccttccgtcatgattgaaagctccctgaggcttcaccagaagcctggcagatgccagcatcaggcttcttgtaaagcctgtagaactgtgggccagttaaacctcttttcttgataaattacccagtctcagttattttttacagcaatgcaagaatggcctaacacaatgtgtaatctttgtttcatagagtttacactacagctttgccacctaactctcctatgttagtacatagaatttctgaaccttcaatcctgttcagaatgccagattgtgagagaatcagttatgcttcaaccttgaaagcatggagttctctgctttcagggaactccagatgactcaggaacagaagtaaaccctagacaaatctaaagccaaacatagaataaagctgaacagcagatcataaatcccattccttgctccctaggaatacctcttcttctaactccagcttcagatttttccccaggtttcacaattgacctttgtcttagtgtccatactggttggacatacccctctggcatagacattcatgataggcattgccattcttcatgatatgtcattcttggctacttcctctttttctaggatgcatgttttagctcacttcatgttcaattgccttgtggttggcctacttcttctttctcttctttcctacttttgtggttgctttatagttgactaattactagttcatcggctctgcttattgcctaatactataaaagttcccttcctggaagggttggggatgggaaagtgggggtgggtggtagtaaaattaactaaactttgtagtgggctggagatagggcatgagtaaaggaaaagttgtattttaggactgctcaactgcatggatatttatactttttaagacaagcaacattaacaaagtctggatcttaaagtagagatctacactggagataataatatccctgtgggcatttaatgctcatggttacctagaaaataagtataaagtaggaaattttgagagagtattcttgtaaagattaaatggtgacaccaatgtaaggcttgaatgttctaataagggtgaaacttggtctgggaatggcagttcttacaccttttataattcttaactgttattttttagatctggtcatttaaatctgaggacccagatatgctagtcttatagaaagcacaaatttaaaatgggttctttgtcttacatagctctaaagtttaggaaaaaagtatcttcaagcaaccttcataggaattctccaaaataaatgtgttcctgattaatatgtgttttattttttaaaatttatttttaattaatttttaaattgacaaaattgtatgtatttatggtatacaacgtgatgttttgaaatatgcatacactgtggaatggctaaagcaagctatttagcatacgtgtcatcatctcacataccatttgtttgtggtgaggacatttaaaatctactctcttagcaattttcaaataatgtaattattttaaatcagttgtttaaatattatgaaattactttcagcccttagagaatagtccatctcacatgacacataaaaatggaaggaggtgtctagctcaggagaaactttttggaatatttgattctctttccctcattttctcttctttttttgttttttaaaaaataatttttaaaccctgtattgactcctggctattattttgaatatgagtgctaacaatttgagccttgtagataactatcccaatgccaattgaaccataattttcatttgtctctttctacaagattctgaattttttcagaagtgaaattaagtctcaattccctataatttacccagggcaataaatcttaaacattttttcttaaaaaaacaaaacaaaacatttttactggaaagactttatggggtggacattaactctgtaaatgccatataacttttggagagggctgcccctggcacagtgtaatatttatgagaaagttgtgcccatactaaccacctgtatgagaatcgcctgcgatgcttttgtttaaaaggcagattcttttttccctatatttttctctttttaaaaaaataatttcgacttatattttatatttatatttatattattttaaaaaataatttcaacttatattttatattcaacctacgtatgcaagtttgtcatatgagtgatattgcgtggtgctgaggtttagggtacgaatgatcccatcacccagatactgagcatagtacccaatagttggtttttcaactcctgttccctccttccctccctgctctagtagtccccagtgtctgtttttgccatctttatgtctatgagtatttgatgtttagctcctacttataagtgagagcatggagtatttggttttctgttcctgcattaattcgcttaggataatggcctccagctgcatccctgttgctacacaggatgcagtttcattcctttttatggctacatgatattccacagtgtgtatatactacatttcctcaatgcagtccaccactgatgggcacctaggttgattccatgtaaaagagcatattgttaggcttttctctgaattactgaatcagagtctttcaatgggttccatgaatatttcatattcattttagtaaacttgctcaagtgacttatgtatacagttataggtttgggaacctctggcctggggaagttgtctgcaacaccactgacaggtccctgtcctgccacagacatttctgctgtaactccatgcttgcattttttgggaaaaacaaagcaagacaaaacaaaactcattttgcaaaatgacacacaaaataaagaggcttctggaaaaagtagggctaggtgaagagaattcaaaacttacgaaactataaactgaacaccaacaagaataacaatgaacctaataaaaaactagcatagttatggctctaacaacatttattctcaacaacttagttaaatcgttgtacccttaaaccttaacactttttttttttgtttttcgagaccttggttcttgaggacattttcttctagcagaaatcagtattaacttctttatccatctctctcttttttttaaactgttatgtaccatcattatagcacttcttacaaaaatgaggagctgtctttgtaacttcatctgtgccatcagcttttccagatagtttaacataaaaggaagatgaagtggttctggaagcaagaaaaccagccaccacttgcagtaaggaaggcaggtctatgggcctattagctcatggaggtttttgtttgcttgtttgtttgtttttgagatggagtctcacacagtcgcctggtctggagtgcagtggctccatctgagctcacggcaacctctccctcccaggttcaagcgattctctagcctcagcctcctgagtagctgggattacaggcacctgccaccacgcccggataattttttgtatttttagtagagacaagatttcagtatgttggccaggctggtctggaatgcctgacctcgtgatccacccgcctcagccttccaaagtgctgagatcacaggcatgagccaccgtgcccggccagatctttttaaataagatcttcatgtgttataatactaaggttgtctctttaatcacaaaaagccagtcctttattgcttcaaattgttcatgtgctgatatcatatgtctattgaggtctgacttactacattaacacacgctggcagaaccactgcagacattctctgtcctccttttttttttttgtcactaacatgataaaattcttaagggtttgaattctcagaggtactgtctgatggttaaatcacagaggtccactgcattgctgatagatttttttttcaccacagtgctgacaatacaattgttcaggaatggccttcatgaccataaggttggtttgacctaggttcttaattgtgatgtctctatagcttttaacttatttcaggatgatttcccccattgcaaatagataattgttcaatagatttgctgcagacttttggacctgatctatagttttcccttgggatatgtaagatatttgaggtacaccaaagtaatgcaagaaatatctttctttagagctagagtttagacaggaagtatgtcatagaactatggtgtgtccttcccaagtgagggatttcattagaccttgacttagaattgaatgtaatgttaatctgtaaaggcttgttgtgagggttttgcttaaatttttaggtttattaaatttttaggtttattaaaattcctaaatgatgatatttttatcagcaaagacaaaaatactgctacttaagtagtagtcactagaaaaataatttattttgttttgttaccttaactgtcagatttaagcacattcctaccaatatttgggtttgggctctgaaacccaaaacttttgaaagctttggaaaattttgtagaagttctttcttctgtcttttttttttttttttttttttggatactattgccactgggatgcaagcattcataaattatgtttaaatataaaaattaggtcggtaactctctgctcgtggattcctgaaacacaatgtacaaaaacccagaatagatcttcgtggctcactttagagcgtaacagcactgggaggtgatctgacttttcattttacacgcaagaaactgaggctggagagaaagaagggttgtctgggtcacaactgttgaggtcagcctctgggattgaacttcatttcctgaattcctcatggttttccacctccattcctcagcttctgtgatccctttggtatggggctgtttcttgaaccttgaataggagggtatggaggtgaagtgacatgtgagctaattcttttacctcactctggtttatctatttttatgtactaaggtcctgtgtattaattaatgagatgagttccacagttgctaatattagaaaatcaacacaattgatttctccttgggaactgtattagttttctattgctcctgtaacaaattaccacaaactttgaggcttaaagcaacatgagttcatgaatttattatcttagagttttaaatgttagaattctgtgaggagtgtcactgggctaaaattgaagtgttggcagggctgcaggaggctctaggagagaaatcattttcttgcctttttcggcttctagaggggcttcccttcctcttacttccaagccaacaacatgacatctctgagtattcctctttaactgcaccaagggaagataatctccttttaaagattcacaccgttagattgggtgaacctggataatatagtcagcccttcctatgcatgagttttgtagctgctgataaggaggtcatctgtaagcaacttgaacatctatggattttggtatctgcaggggatcctggagccaatcccccacagttagtgaggaatgaccatatagcataatttccccatgttagtatccttaatctcaaggtctcaatcatatctgtgaagtcccttttgctgtgtaaggtaacatattcacaggttctggggatcaggatttaggatctttgggagccattattctgcctgctacaggaatgaatttgtttccacttgtctcaactctaagtgggcagttatttaaaaactttgtattaatttagagagcttcataaaatgctaaaattttctgagaacctaagtgataatataagaagaatagctaccaacatttgttgagtgcttgcaatgtgacacacactgactgctatgtgctttaattgcaatatcttatctaatcattttagtagccctatgagataggttctatttcatttacattttagaaaatgtaaaatgaggcttagagaatttaaataatttgtccaaggtcaaacaactagcatatgggagactaagacttgaaattgggtttgtctgacccaggcttttaatcagcatattgcactgtttatatgtagctctgaagtggtaaaattgtaacatagtgtaatgcagtactgagaatataatatcttagtaatttttaataaataagtgttttagtaaggaaaataagttgttattaggaataaacactttctaaatgacatagtacccattgagcagtgttcaactgattaatattagttggttatatactgatttagtgatcagttctcaaagcctcaatttaaatagaaaaggagttatgtggaatttaagtggaaaggatatagctactttaacaattttttgtgctctcagattgtaaagaggaaggatttattttacaaataaattgcttgtgaaagaaatttaattggttaataaagtctctatctcttgccccctaaccagaatgtcaactccaggagaacaaggatcttggttttcatactcaattctatatgtccagtacttaaaacagtgagagcaatgtaactgatgcacaatgatatttgttgaatcaatgggtactgacaaattcctaagggaataaagccagttatctacatgaataaggcaggatctagatactagctgcatgccagaagaagaatatagagcgttctaatgtgtttggctaggaacagaccatatcatgggctaatatgatagagtaataaaggtagtgataaccctgataaattcaatatgtttttacataaatcctgtgcattaaactagtagctcacttgatatggagtgtttgaatcacagattgactttgctcattcgttcttccattcagtcaacattattgagcactgtgctagttattaggataaaagatgcattaaaagaataaagcccctaacttccaggagcctctgtctcctaagtgaaacaaacatgtgtaaagataaaataccttatattaaatggaataataatggttttatagaaacatggaagagggatacttaacttattattcaaaagagacacttattcgaaagacataaattgagtttagtcatcttgagttttagaagaaataatttttgatttatggagggattgcaaatataggacagagagttctcctataccctttattcagctcgtttaataatacatagctttgctatattgatcaaaactaagaaattaacattggtacaatactattagctaaactgcagaccttacttggattgaaccatcttacagccttttgtgctaaagggaaattgtgtatgaaagtgctttgtaaacagtaggctaaatagtggtagtctaagaagtgccatctggtgagcccagggtaggtcactgagggtgaaagttgcattctctgaagggagctttaaataatctaaccatgaactctattttattttattttattttattttgttttgttttatttatttttgagacagggtcttgctctgtcacccagactggagtgcagtggcatggtttcagttcactgaagcctaaacctcctgggctcaagtgctctgcccatctcagcctccggagtagctgggaccataggcacatgccaccacacctgggtaatttttgtattttttgtaaagatgatgttttaccatgttgcccaggctggtctcaaactcctgggctcaagtgatctgcctacctcagcctcccaaagggctgggattacaggcgtgagacacggcgcccagcctgagctctctatattttagtttcctttaataacatgatcagttccacccatgaatttaattaattccttatgagtttgctattaaaataaaatgagcggttattgatgcttattgtgtgtgtgacagtatcctattcaaagtatgggatacagttctttgattctctcactccatcctgtggaaggtaaacttaccttgcagatgaggatgaagttcacctaggtaatagatggacttggccaagccatgagactttaggtgggaaaactggaatcagaacctgagccaacctgacttcaaagcccaagttttctcctttgtgttgtctcctgagtcattttcctgtatagccccgctgaataagcattttccaaattatattttgtattgtgcaaaacttcacttccttttttattcaaagactatgtatttcatgcttcaaggttttctgagaactgcagtattctgcaaattctcaaaaaatgcttttgctctttctaagatttcatgactttaaagaacagttactttcttcctggccttcctggtgtcagtctgtatgattctataatgtttagtgtattcctttatattggctgccctttcctttgagcatttcggtaacttttcttgatagtttccagctactttttttttctttttgtctctcaagaatgaccaaaagtatatgtagtttttcagatatttgtcatgtaatttcgtgccatctagatttatataacctaacattttctggctttttcttagatatttatagatggtggtggttaaatcagagttaataatattaatttttaaaatatgcaaaatgcttttattgctctttttaattaggtttttacaactgtattgaaataggtgtggcaggtgctatttcccctcctttttctgctcaagatgattgagattcagagtaattttgtgactgcttcatcctgcagaccaaacaagtactttacctaagtttcctgtctccattctttttgatagggtctatcaagcttgtggcaaaagctcaagatgttatgtgtagagttcagtaatttaaattcatggacttataaactattaacaaagaatctaattaaccttctttctaagtaaaaacaaacaaaacaaaagatacttctagtagagtgccagtgtctttagggattcatggggaattaattaaattcatggttggtactgatcatgttattaaaggaaattaaaatctagagagctcatggttaaattgtttaaagctcccttcagataatgcaaatttcaccatcaatgccctaccctgggctcacccagaaggcatttcttagactaccactatttagcctactgtttacaaagtactttcatacatgatctcattgttcagcacgaaaaaagctgtacacaagttggtgcaatccaagtaaggtctccagtgtagctaatagtagggtaaggaaaacgatatgttgacatgctaagtgagcttcattttgacttctttcgtgtaacatgtttgagtctttgtgctgagaaaattgtattacattctgggagtcagtgggttgtgtcagaatgtgtgggaagcagctcactttcactttcaaaagattctttaaggaatttatgctttttgtaaaataggggagactatttggactctttcttattgggatttctttttgtgtgttttatgagaccaaagggcactgacttccatcatacggtttgactttggaggacagtacgggaaagtgcagcagccttgtagttatagtggccacagaatgtagtcacagaataatgtagcaccaggtttcttactgtcaacaatctgtttaatttgattttggttattttccacctcttcagcaaattcatgtcactgggaaccctaagataaggaatttgccttccctgatcttcctgtggggtagaagtaaaatgataagaattcaatcgttaggttgtccatggacctgcttaagagtgcaaggaggttttaaaggtccttagaaagtcaaatgtggaccctgctgaagaagggatgcagcgttgcttacttaaaactgtagtgaacagagaagagagaaatttaactttgatattgtaggcctcaacgagtaaagaaggctttcaatcctggcaggtactaaggttttagtatcattctctttaataagtcatctgtggacaaaaatgaaaaaatcagaaagccataattactaagaaaggagatctgactaaataacaaagaaacagattttagaagtcctgaaaggacacatttgtttcagaattagctctgctaaaatttttctttttcacagaaggaataagctttaaatggctatgtgaaaaatagattatagggaactaatgttcttagatcatgaatcagggactttgttcatttatatgcactgcttaaaagttttcacatagttatcattgtttaaaactaattataatcaattgctaactcatcttacctgggaatttatttagtttagaacatgtaagtaaatttctttaaataaaaaagagaattttagtggcatgaattaaatgtaattcaacttgagcaaagaagaaatggttataaagacaaatattaacatatcaaaatcatgttaatgtgctaactttacctaagcaataaacacatcagaacagaaaaaaacttgacaataagaaaataagtaaatatatttttaatttttagtaactagatgtttctcagtttttctgtttaacattttggaagtgaatatggctggtatgtataatgcataagaaaaaaatcctgttttatgacaatggaaaaaatcatatttataagcttatgtcatgtgaactttgctacacatcaattaggtaaaactgtactggatccattttaaccctgtgagttgattgctttcagtgaagcttgctggacatctttatgtccgagagtgagatgttcttataattaggggcagctgtggtgacagaatcaattaggcaggcctgctgaacacttaccttccagctgctggccgcggcgcagtgatttgctccagcattcattgtcacggtgtattgcctttacacctcgaaagaacaacattaatccattaagccacttttgttgctgtatcctcacgtgggggttatcacatcgcagtgaacacaggagtgagatacagcactgttcacccttgtggcatttggcatatgacagatagacagctgcatagttcaaaagaattattttaacaccaatcgcaagtattgccttgttttatttccccatcaattatccaagtagctcagaaaattcagcaattttgcatatctactgtatttctcagactgtcttttgcacgtggaataagtgcagaaataatgtcatgtggtgtatcccaggttttgtgaggaaaatatggaccctattgatagatcattaaataaaatctttagcacattgtctggtagttaagagccagggctctggagtcaaacttcctgggttcagatactgacttgatagtataccagccgtgtgactatagacaggttactttacctctctgtttctgtttcttcatctgtaagttggtgataatggcagtaatacatatctcctggagttatcataaaacttaaaaacgttaatgagcataaagctcttagaacaatgcctggcacatagtaggtactcaagtatcagctattattattcaaaggtgtttattgttgaaagtactatatatatatatatatatatatataatgtgtatatgtatacattacattctactatatatactatatataaatatactgtaaataaaaaggactttatttaacttcatctcataggctttggaaatacattatagttgttttaagatttttatctttagtccctaactgtgaagtacagggcaaggaactgtatagaaaagagagattgctaatttcaataaataactaatttcaattatcagggtgaaaaattatctcacctaataaacctgcattcattttcccttgtagaattttacagtattgtaaatttctcacagacaaatgtggagaggtgatttggtttacatagctcattataagaacaaaaaatttactgtagtggctatgaaatggagtgatctttcccagatttttaatctactgtccttctctccattttctgcctccacttcaaactttgtagaaaaactaggtatggtaaaaagtcctaggtttaagttttggttctgcaacttgttagacttacgacattaagttcccctatcagtttccatctcctcacctgtaaatggaaacaatcattaggtaccttacatgaaatacacaccagaactgttgcagatgaaaggagatttgaccaaatagtaattttgcggatatgtagtgacaacaaggcacattaacagttaagggagcaaaccagcatcttgtagaccatggtcaatcaatggagaagagcaactttgacttgagggcataggaggtatggtggctgacacttataatcccagcactttgggaggctagagcaagaggattccttgaagaggattgcttgaagtgtttgagaccagcctgggcaacatgaatctctgtatacaacaaaacaaaaagcccagcgtggtggtgtgtgcctgtgcctgtggtcccagctatgtgagaggctaaggcaggaggatcacttgagcttaagattctgaggctgcagtaagctgtgatcacataacaccactgcattctagcctgggtgacagagtgagactctgccgccaaaaaaaaaaaattaaagcagagaaggtaatgtgcttttcttgcaataatacaagaaccgtctgaccactctgggtagactctgaaattaggtgaaataaatgagctagcaaggaacatgaccagggtctcggctgaggcagggtccagtttgagagtcctccaacagtgatggccagataagagaaatacagaacatgaaaacttcaaagtaaagataatacgacttacttgacaattttccagttagatttacatgtcatttttgttagtgtctgatggcagagcggcataagagtcctagcccagtggcatgcagaacacaaacaatgtcacagggcctcacgattccaaataataaaaagtcatagagaagatagatggggcctctggaatcattttgtacctgggtttcttctttgtcagcatcttccagattcttcctcatcctttcagcagacacttgaagtcctactttgggttaggagagcctgagatcctgtatatcttccattcaataaattcagaaattttgatgtttaggtatagtatcaatccaaatggacacatacacagtcaggaaatagcctaaccctccaaatagagactgtgaccccctgctattaacttgctgacccttgtttgatttcgtagggataaattccttgaatggccctctgtttgtacatgtgggtttttttgttttgttttgttttgttttgttttgttttttgagacggactcttgccctgtcacccaggctggagtgcagtggtgtgcccactgcaatctctgcctccccagttcaaatgattctcgtgcctcggcctccctagtaactgggattacagatgtgtgccacaatgcttggctaatttttgtatttttagtagagatggcgtttcaccatgttggtcaggctggccttgaactcttgatctcaagtgatccatctgcctcggcctcccaaagagctgggattgcaggtatgagccaccagcgcccagccctctacatgttttttaagtgcagtcagttgagtatggttttcagatggagaatctgattaatcatcttcaatggccttagcataagcattctatttaactgagctgattgtggctcataccctcaaatcaaatatcttaaagaatcatactgtttcagtcatcgtgtagcagttaattgtgagaagtgaaacttggaggacatccgtatgtaaaatcccccaccaaaggaaaccaatatgtttgggaaatcaaaatgaagcactagtaagaagccaactctggctgtagtggcaccactgtgatgagtgttagcataaaatgctgaaatactgcccccaattttattcttttatgttgtataatgaaacgttctatgcatgttatgtgcttgcaaagaaattattcagtagttcatatacacatcgttggattacataaggagctggacatggaactgctagaatggaatttccagagtccagccatcttaaccctactttgaagcctattcccagtgtgtttgctggttggatttagtttgctgccagtggtaaagagagtcagcttgagaatatattataacaaaatactgaattttatggcaacttttatttcaaatgaaggtgccatcctccttcctcagtagtcagggacaaatagcagctccattccagctcacagggaaccctatttaacttgaatcaagaacattctgtctaagcctgattcagctagagcacagggcggggtgagcacaacatcaccacaggtggcaacaaataatgatcttgttgggcgattcgggatataacccaacatcacccactgcgtcagtagcagggcattaaaacctagctgcattccgaaataccattaccactagaatgtgctgccttttacacagctatatttacacatttgataagacaaactttcccttttatagccaaatttgtgagtgcagctcagaagagaagaccagatggaagagcacaaagtttatccactctgttgcaggactgtaatcaacttcgtgagatagtacaaggagagagaaatatgactgggggagttttggagactctccatagtaatttatctacttctaacatgactattaacaaaaggacatcctgcatagaggactgattaatggtattcgtgtggctttcattagctaacataattgtcagtcaccggttgtcactgtgggatctgcacatatgtgatggtgggctttttacacatttatgcagggaagacttagctgggatcatagctgaaagctcattgttacttgataacattttgcaggtttcctgtgtaatttgttcaatgtgttgaggctcttcagattagctgcacaaacgtggagagtaaagatatgagctagctttgcattgtcagatccttcagagaccagaaataacaacttacctagtgtcacatgccatcagcatatctctgcagcagacacatgctaaaatttgtttcctgttcttaacaatacagtacaatattcgatatagctgcacgaataatatttgaaaaataagggcacagtagatgatcaaaacaagaggattgcttagatgaatgaggttgtttttttggaaatttattttgcccttaccacaagtattttttcacccattaaattattagaataaatgaacatgttgcattgagtttttgtggtggtcagaatatgaaatataagtatttttggattacaaccacatttttcttccctaaattgtgtgacatagcaaataggaaaagcagaacacaaaagtagactttggaagtatactttgcatacctgcatgttttgagttagagtcagaggagtatatttgtgatcttttaagatatttgaaaacacttaaagcctgtaaagagaagtattcaaaagaagctcctgtgaaatgtgtggcattgctctgaaagcatttgcatgtctgttttaaaaggctgttctttgcactggactgtctgcctctgttgatgcatttctaaggatgtggatatgtttatattaatgtcaagcaagtttgaaatagatttaggcacagactgcttaaaacttgctctgttattaaattgtttcagggtgtggaactaccgcctctctagaaacacatagagagcaaaattatgaactgcggtagaccaaatacaattaaatcatgcttaagattctcggaacacctcctgcatttgaagcattaacttagccttgagcttgccttcaactaatttttaattaacagaccttttatgcttagataagactttcaagacaagtaaaaatttttttgcacttttaaaattcgagtacttacttaacaagaattgaccctaagtttaggaactaccattggccttataaagttattcctgggtattagaagatacttggtgaataggttttatttcagtgaaataaatgatattgtttcatgtgagtaaaccatatgcctgagaaacacgtgtacattgaaaatgaattctattaacagatagctatttatataatctctgacaaaaagaaaatttactctgttgaaaattgactcattatggatagatgaaaaaaagtcatacaaaccacatgggctcaaatattagtttgcacttttataagaatctgtgaaatattcagggctattccagtagtcctggaagacaaaaagtttgaaaaaatatccataaagacaaaaaaaggtttaaaatttttgccctgtgtccttgatacttgaatttgagctctgccctgagtgagcgagaacctttgtatggtccttgtctagaaggtaccactgacggcagaacatccataagtcaaggatgcaattgtgcagctctgttggtagtacacagatgtgtttcttcacttacgctatggaggattttgagttatcaacttaagagagctgttttctgaaaagctggatatcctcatgtcatagaagttaccccagaaggacgcagcagggacattattacacctggacttctagggatgcaaagttagagtagctgtgagcttttccacatctgatgattttggaactatgtgcaagagagagaaattcaggctggtcactagaggtatccttgaaccgcaaacatcgagaaatgttcatacatcagggtcagcttaagaggggatattttagctaagaaggaccttggatctgaaggtctctgcctcattgcattgtagatcatctcgtaaggcaaggaatgtaccactctgcatatggaccccaaaaggaaaggagaagtgttgacctgcccaatgagtgattggtttccttccatcaaaagaccatagtggggttggggccctgaagtcacgattgtgaggatgaaccatgagcatttcagtgcaataccgcttgcagaatttaaatgatttaaatgaatgtaatgttattattaattaaatttaacttataaattattaactcaaatatttacaagaatttctttcatgaatgcaaattaaccaagagtttaaaaatacttaatgacatgaacataaagaagaaacctccttgagagcggagggtgagaagaacgtgacgattgaaaaactgccagttgggtactatgcttattacttggacgatgaaatcatctgtgcagcaaacccctgcaacactcaatttacccatataaaaatctgcacatgtaccccctgcacctaatataaaagttaaaaagaaaaaaaagaaaaaagaacagactaatgcacacacgcacacacagacacacatacacacgtgcgtatttaatgaagcctaggtcttttatctaatggcagaaagatcagatgagaaaggcagaaaatcagagacagaccaaggctcccggtttttttttttttcctctgtatgtgttagcatgtatatgtgtaaatgtatttctgtttgctaaaccatctaaagtttagttgaagacatcatgacatttcacccctaaatgcttaagcagatattgtctaagaacaaggagattcctttgcgtaaccacaacgcagtgctcctgcttgagaaatttaactttgatacaatatttttattcagatttccccagtagtcccaataatatcctatacagctctttttcccttggagcaggatccaatcagtagctccacattagattgacttgccatgtctctttaatctcctttaatctagatcacatttacagtcttcttttgttattgatgacattgattttaaagcctacttcagttgttttatagaatatctctcattttgaatttgtcgtattgtttcctcatgtttgaaatcaaaacccctaatacagaaataaataaactaatgaagacagaaggtgaagaggaaggagagacgagctagagagagaaaagaaggaaagagaggggcaaactgattttatgataaaatgtttatcaaaggggaagaaaacaaagtctccatagatttatgctcagactatattgataagcaaatatatggagtggtaaggggggaaacatggtccttaaagagaaggtatctgaagtatagttgacactcagacaatgtaggcattaggggtgccaatcccctgtgtggccaaaaatttaagtataacttttgactccccccaaacctaactactaatagcagcctactgttgactggaagtcttatcgatcacacaaacagttgattaataaatatttttaacttatatgtattatatatggtattcttataatacagtaacataaagaaaatattacaaggaagagaaaatatatttattcatcaggtgaaagtggatcattataaaggtcttcatccttgtcatcttcatgttgagtaggctgaggaggaagaggaagaggcgggcattggtcttgctgtctcaggggcagcagagacagaagaaaattcatgtataaggcattttgcttagaggcaagggaataaaccttggaagttctggtgtgttcccaagttaaatgtaaaatccagaggggtgaagaattcaaactagttatttcagtttataataaattaatgaggcaatgtatttttttaatatgtgtaaaccagtttttggtgtcatgtagcaccggcagatttgtttctttaaaacccttcaccaggccattggctcacacctgtaatcccaacattctgggaggccaaggcaggcagattgtttgagcccaggatgtggagaccagcttgtctaacatggcgaaactctgtctctatgaaaaatacaacagttagccaggggtggtatcatgcacttctggttccagttactcaggaggctgaggtgggaggatcacttgagcccaataggtggaggttggagtgagccatgatcatgccactgcactccagcctgtgcaaccgagcaagatcctgtctaaataaataaataaataaatcccttcaccaggctcacaaaattaaaaatgatcttaaggagttaacagaaatatgtagacactatttcagataacatgagaatttagtctgttttaaaaaacctgcaaaacagagattcatgaaccacattttaaaaagacttctatgaaagctcttcagaaaaaaatattttcaaggtgtcaaaaaaaaaaaaaaaaaaaagaaccagacaaaatattcaggtatcaagggctaagaacagctaaaacatgttttctaatttgccagtggccagtgtgtcaactacattaaatggctgcttctccacctcatctcccagccaccaaataaataataaggggaatatgtagctgtaggggtactgctaagaaatcacagcattcaaatgatttttttctgaaatttattggaaacttcgtatgttcattcttgacatttttaggatttacttggcaagggcagaatcgtagaaaaacaaatagagttccctgagtaggaaaggtctccatttcctgttcatggttaggtgatcctgattactgtccttggagtcttgagccccttacccggtgaataattaggtacggaatcagggaggtatagactcatttgcctgggtttgttttctgggagtttctgtttaacattcctgaactggagcagaagtagattttgtagctggcttttctgagactcaggaaacagaattgtggaattctcaggttctgtgacatttgttgattattaaagtgaaattatgtgtgagaggaaaatttattcatctatgcttttaagaaatgtctatgataaacagaattagacatactatatagaattgcataacacaccaccacatgtccgtattacccagtttccacagttatcagcttcttggtaattgtttttcacctttatgcctatccatttcccaccaccatattattttgaagcaaatctcggatattgtaacattttatctgcaagtatttcggtacatatttttaagcagtcttgcttaaaataagaatggtatgtaggtgtttaatgtattctccaagctaatgcataatttaagtactcacagtctctgttgagactatttagatgcactaaatccaatcaaagagagaatttgttgtgagtagtggtcatctggaatggtccattcattgtgtatgggatagaaactctgtaggtccagtcaaagagtgatagcatcagagaatttctgtcttgaagaaaggagccattgttaagattgatgggttttctgtgttctttggtcccctctgatgacaggatagtgaaatgagccctagctccgagtacccacaaactttgtaaccatggataaagtcagccacttacttatctctgaaattaaacttcccgattttaaaaatggatgtgatgcttcctgcgcctattcacagtactgtgatacactgtgatttgggatgtgaacacgctttaaaaataatggcccggttacatattctcctttttattttttatttttttttaatttctttttgaaacagaatctcactctgtcacccaggctgaagtgcagtggtgggatcatggctcactgcagcattgacctcctgggctcaggtggtccttccccctcagcctcccaggtagccgggactacaggcacatgccaccatgccgagctaatttttgtattttcatagagatggagtttcaccatgttgcccaaactggactccaacttctgaggtcaagtgatcctcctgcctcagcctccgtaagttgggggattacaggcgtgaaccaccgtgcccagcctacatacgctcctttaacacaggcttttggttctttgaaattaccaacattcaggattcttaatggcatcagagaatataaagcttgaaactatctagaatttttttaaggaataattttctaatcttggttctctgcttctgagtatattttatttgggcattttatttttctccaagatgagatccattttcgctcatccattttgaaattgtttttctctctgttaataaaacctttggaatggtgccttgatcaggctaactccagattaaatgtttctctttgaaagattgcctggtgatcagagttgtttttcattctcttttcttcttttagccttgcctccccgattgaaagagatgaaaagccaggaatcggctgcaggttccaaactagtccttcggtgtgaaaccagttctgaatactcctctctcagattcaagtggttcaagaatgggaatgaattgaatcgaaaaaacaaaccacaaaatatcaagatacaaaaaaagccagggtaagtataatgcataaaatagtagagactgcccccagcaataagataacatataaatgttatttagaccctaataagtgaatttactatcagaaacataatagataataagtgaaaagctgtttcattatataatgacaaaaaatcatgttatcacataggcaagaattcttgtggttcttacatcttattgatgaaggaaataaaggatggctggagaaagaactgtaggaagtaagaagagatggaagggaagaaggaagagagcattagtggtagatgctgtcatagtaatagatcctaaaattcaatttcttggccgggatggtggctcacaactgtaatcccagctctttgggaggccgaggagggcagatcacctgaagtcaggagttcgagaccagcctggccaacatggtgaaaccctgtctctactaaaaacacaaaaagtagctgggagtggtgggcgcctgtaatcccagctacttggaggctgagtcaggagaatcacttgaacccgggaggtggaggttgcagtaagccaagagcacgccaccgcactccagcctgggcaacagagcgagactccatctcaaaaaaaaaaaaaatgcaatttctttaaaataagacaaatgcatatgataatttagagtaccagtgccttacacagttaaaatcacaacttcattgtaaagctcagtgaatacttagatttatggaaagaattggaatgtaaccagttgaattcagactattttttaacaaggggttaatgatataattttatctaataagaatttttaactgacactgctgataaagcacatcatcattctagcagattttaaaattaggtaatcttaggtagcaagaattttacatgttcctaccctccccgaggaggtccatatttgacagggcttcatgtgattcctgtaacatcttggtggatgcattctgtatctactctaaaatgatactctgttatcatccctacactcttcattcttatttacttccttacttaagaatcatttcttctaatatcaaactacattttgaaatcagagaagagataagtggattagatttttgcttctaaagagtcctttaatcaacgtgacatgtataatagtggttccaaactcaaagatgatattttctgcactcacatctcacagggttccagtgaacccccaagtatggtaacagaagcaacagaacaatctcctatactttgattttataggacattaaccagaaagttgttacacattcatgagcaaagtgattacaatgagaattaaatttaatcttatcaaagattttgctctgatgactgtattttcttttctagtttctgtggttttattagctacatactttattaactacacgttgactctagttattgatcatgtcagatagatctatagctttggaagtataataaagtgtaaaagaaagggttgtatcactttctgcagcaggtggtacttcaaagatacaaaatataatactgtaaagagacatggcatttttatacctaatattactaattttttttacattattccaatatgtagcagttcagcagcacatggcaactatcttattttgcagattaggaaattgagggtcaaaaaagtgttctgctttgcctcaagtcatataactagtaagagactcagtgagagctgagtttatcattgttatacccattaaaaatgtaatatactgagaatgaaattaagtttcttcctgtagatcatagtggtaattaatggttcaagttagatttgaaataggtctgactctaagtctcatgtttaacagcatatgtgcatgaggggaggaggaaatacaatgaatgaattgaaaagataagtatgattcttacaaagaagtttaacaggacaaaaaaatactcctagattttggatggaatggattttggtgtttgcttttcatcagacaagttagtaaggaatgaagttatctctacatgcagggtaatgtctcatttatttctacgtggctgtcaaaggataccagtaatatttaagtgcccatgaaaggttttatgctaggactgtggagaaattaaagaggtatagggcattacaatctctgtgcccaggggcgggggtcataagattgtacagagattatctagttcagtcttatatgaaacatgggaaattttggaagttatgtattgaaacactgttagagcaggggaggaggaagggagggaggagaatttcatctagaagaaagcatctcacattgcagatattcaatctgatgctacctggagagaagcaaatgaagttcggtagataagatgagaaaatgaatttttttaaaaaagtgaactgactagaatgaataggctttagaaaaggtacatgtatacttaaagaggtaatttgttacctggcttcaatgacatataaaagtatcattagtattcagaaaagcattttcatattggcttcataggtccagacagctaagagcactgtctacatattaataaaatcccattataccagaaagggcaatagttagaaattacttcttttaaacaatagtcttgctggaaagaattaaatggggaaaaatgtattgaagtgatgcaaccataaatcactcgcagcaaagcagttaacatatttgatctaaaaataagacatactttgtatagagtggacagctacttgagaagcgatcatcttatcagtttttagaattgggtattttgtcatttctaaaattgtgtctttttataaagaagagcattgtcagcttttttaagattaaaggttccaactgaatctcaatttaattaacatttgcaaggtgttctattatttcaatttatccagtaaatataagtagaaggaatataattattgttatacccatttaaaacattaatatcctgaaaatgaaggaagctgagtttcttcctgtagatcatagtggtaatgaattgttaaacttagatttgaaataggtctgactctaagtcttgtgttttttcaacagacatttgtgattatgctacataaagttagaagtcagaacatagggctctggcatgcttaggataatgtctttaattaaaagattcttatttttcagatgcatttatatattactattaatgatttttaattactaagatattcagactattagtgttttgcagttgttagttggttacttgacttaaactttttcttaggctatgatcaaccaagcagaggtgaagtttagtttgaggtgtaagatttttctgggattctctttaattaaatactttgactctttcccaatccttagtcttggcttctttttcacacttcttataatcagattatgcatagcagccaacatatccttttaatctcttggtgtttagtggcacaatttcacagcaatatgcaatttctattattttgtaaaatcttacccttgttttgcccacggtcctactaaaaactacattcctacgtgttctttgtatgatttttgaattcccattgagcctttgtttatttggctaacccatgtgtggggccaatgaaaagaaatggaaactaccctcatgttatatgtctgcttatgtctttgttcttgttttctttgattggtggatgattttgatcaagaaaactggttaaaaagcttggcgtgtgacagattcatatgtaaggactggcagattgacctcatttaaatacctgttctatcttagctttattaaagactggcttcctattatttgtatgtttcacacacttttggacaccattaattttgcctcagctcttacatattttaattttgtttaaaattggctgtcattggttacattggacaaatattacaattatttcctctatttttactggttgctttttttgactttataatggaaaaagtttatgtgcatttcttttctcatattagctgagcaactctggcagatcacttgaactttatatataatgaaatctcaatgttcttatgtagaaaatgagaatcctcagtggcattccatatggtttatgtgaggcacttggtacagtgactggttctgttgcttaagaagcctctcttttagccaagcacagtggtgtgtacctgcagtccctgctactgaggatctcttgagcgcaggagttcaagaccagcctgggaaacatagcaagaccccgtctctatacttaaaaaaaaatcataatttcctctttcacttctttgtccttttcacgatgatcagttttacactatctgaagcagtgttggacacacacacacacacacacacacacacaaacactgtctatataattccttaggggtcagggaaccaaaactgtataaacagaagagttcttccctatatgtgtttaagttgccttagcctgtaactatggtagaataatcgagttaaaataaaactaaactaaataatagctaatggaaccttgaattcaccttgtaagtgagcacacagtaaaaaacacagtgtgctttctgatattaaaaaaatgaaaaggaaattaatattcagaactttttatcttcaaatcacttcacattaatttatttttacactgtactgttttttcttattctaaaagtaatgcatgcttattatgaaaatccaaatatttcaggaatatagaatgtaattactataataatagctaacacttattgggaagttactatattgaaaaaattattttaaacactttacacgaattaactcatttaatatttttagaaaataaaaatccattgaaacaccaaccttcctccagatccctagaaaactcatcaattaaagagcaaaaagttaaatttatgactataagggaatcaagtagtctttccaagctaatttccttcttatagacagagtatggtatcttacagaaaagaaaaaaagaagactgttgtatccatacttatcaaagccccaaatctttttgcaatatataattttcaaggaagatttggctcattctacactcttactacattctgtccttactctaggacacaaggctggatgaatcccatagttaaatgtatcattagaattcagagggatgtttatgctccttgaggtcagtggttttccaatgatgtctctgtagagtcctaaatttctattgaattgcaaaaaggattaccagtcactctgacctggaacactttctgtgtgatatttttgaatatgaggttctgatttaagctttcattttaaaacaggattttgttgtaaaaaatagttgaaaccactgatctaatttaatctttctctgcacagagatattcttgtaggaatgtgcttggcaggtggctatccagacttgaatctttccaaagagaaaacctaactctttcacaagacaccctatacatttttgaatgctcagaaaagtgcttctatgtaatatcattcaaaacatgtttcctttttcctgtaagacttagttttcctgtaagacttagcaatcccaaataatttccttttccatatgcatcctggaaatatatttaaatagctactcatatttcattcatagttgtctgccagtgggacctctgtttctttaacataatcctctctagtgataagatttctaggccctattcaattctgatcaccctcttctaaagtcctttaattatgtttttttatcatcaaatatcattccaaagtatatccaaagtataattcagcattctagatatgatctagccgatgaggaatgtattggggcttttatccaagttgattgatgctctgctttaatattaatttggctaaagagtacataaggttttttttgttattctttcttcttaaaaatagttttaaaaatgggttaataataagcatgtggctaattagaaatccttatttctgcatatattgtagtcaagggatatctcctcttgtatttatgtcaccagttttcgtacgtgaatgtacttgtgatgcttatctcgatcaaattgaatcttagtcttggcccattgatgttctgtcttaggattcccaagggtgttctccatagaaaagattccatggccacatgtcatggctgccttagaaattcacagtacagatttgcaaaaattcactgagatgcattgttgtaaagagacctatttaactttttttaatgcaacatttattttagcatagaaccattttttttaaatctctctttcttttaaagcctaacatttgattgcattactaggaatagtattccaggaaacagtgccaaggcctattaggagaagtttgattttaagacttatccctttaagattatgttaactgtaaatatgattaccatgttttcttatagttccatctagttcaatagttaaaatgttaattgcattgggtcaagaaaggggtctttacatacaaacacgattgttcctagatttgtataaataggaaagaaaggttgttcttgagggtgttgtaataatcttggagttgtaaattcttgggatgttgttgtaatcttatctcagaatttggggacttaagaaaagctacagttttcttactttagaaatttactccttctgtggcattgaaaatcaagatactatgccccaccctgatattgttcataatttatctattattgctagtggtttcatggttatacatgaaaattcttccagcaaaccatgctaaatgttgggctggaaaatcttacagtgcttatccatttttttcctcactatttttcaaaggtacctgtcatgaaggaaacttgtcatatatgatcaaagtagatatatagctgataatccatttaaaaaatcatacggtatttgaacgctccaaaattcagccccaaaattaatacagcctgcattgggtgatattctaatattgttttatttcgataattttaaaagttgtcatattttattgttaagacatatctatttgcaaagatacttgtcatcaaaaggcccattttggcttatagggatatacttcagggaagctttcctatgaataatgtctctggttgatgtgtgaatattctttaaatggcccttggtggtctccccattcctagatagataaggctgttaaattacatccactttttgtcaactttgttccgtggaccattattttcagaaaacattaacagatatgccttgtgaatgaaaaggattccatggtcaaaggagtttgagagaaaataaataatatatcccttttcggggagtcagagtacaacagcatattcaagatgctgagaaatcctgtgagattaaagataatgaaaagcctgtctttatttcacctaatattttccaaatttatttgaatgtggaacacattgctttgttacctcatgtttacctgttgacatcgagtcccgactagcgcagttaacttttctttttctttttctttgaccaagtctcactctgtcacccaggctggagtgcaatggtgtggtctcggctcactgcaacctctgcctcccggattcaaatgattctcccgccttagtctcctgagcagctgagactacaggctcatgccacacacctggctaatttttgtatttttagtagcgacagggtttcactattttggccaggcttgtcttgaactcctgacctcgtgatctgtcttcctcggcctcccaaagtgctgggattacaggcgtgagccactgctcccagccgtgaagttaacttttcaacccctatgttggtttgaccaccactgcccctggtctggaccacctctgatggtctttgccctctcattatggcatttttctttcctcccaaccagccttagaaatattaggttctgctgagtacttaagcaaacatccagatattttattcattcattcacacatttattcaataatgtctgaagagaaagcatagcctgatgtatgctccacgagactagcaagaagttgacattatagctacactctccaaagtatatgtcctaggtcaagagatgagacatactgaaggaactctcatgagaggcgtactcagggctgtcagaatttagacacgtgagagcagctccagctacatgaccaggaggggcttggtgaagcagttggcacctgacatggccctggaaggtcagctgagattttgatgcataggaatgcaggacccccattgtaggaagaaaaaatgacacagacaaaagcacagaggtggaagatcagggggtctacatgtggaactttgggtggttcaatcggatagactggaggatactagtaggaattatatttggaacaattgatttttctcagttaacattaatgtgtgacaagaagaccagaaaattcaccagaaaactagcaaagtataacgtgggagatttgcaaccagaaggattactgttgtttcttcctcctttgttttctcccttgtcgttatccccttaagagcccaataaatcacagttaccaggctagagcatagaaggattgctattattttttggagataggggtctcaccctgctgcccagactggagtgcagtgactcttcaccagcatgatcatggcacactacagccttgaattcttgggcccaagtgattctctcatgtcagcctcccaagtagctgggattccaggggcatgccaccacaccaggctttagaataattctttagaaagaattcagtaaactctgagccaatccctgctgttctgagttcttatatcttggagactgcttaaattataggttatgtgcaacagtaaaacacagacacagcaaatcacaatgctgcccatgttaaaaaaaaaaagtgaatgttgatgtaatattcagagttttataaaactatgtgataatgttgcccaaatatttattccagtattaagaacctttcatgtggtactatgctcccagcaatgagaatcttaaggaaagaaaaattcccttccttttggaattgataaatcctcttaattcaaaattaacattattcttgatgttactctactgagaagaagagtgcacagtatttttaaaatctattctaaccttcagtaagtgtccttaacagacttgtaggaaatgattttatacatttttctcttcctaaaccctagtggctgatggcatttggatatagaaaagtaagaaaatttaccaattgggtttaaaaatctaaagtataacacagttattggtgatggtaagggagtaaaaagaaaaactacagaagaattcctttaaactactgatttaggtgataaaattgagatgaaatccatggtacaacttaaatgtgatgcatcttacttttactctaggtaaaatcatgaggtcagatcaatgtaacggaagttgtattttaacatatgtataaggtggggagaggcagtttgagaactctgaaagcatagaaaagtatgtatttatatttgttggatttctgtgatatatactgacaccactttggtcctgatcttataggaagtcagaacttcgcattaacaaagcatcactggctgattctggagagtatatgtgcaaagtgatcagcaaattaggaaatgacagtgcctctgccaatatcaccatcgtggaatcaaacggtaagagatacctacggtattctgttcctcaatctgtaacaagagtaatcaaaacatgtggtaagactcataatagactggtgtgttaaatctcattgtgaacaaattaaaaacagagaaagaaaaccagatgtttcaaggatcttgtatgtctttcataaatttctgtactctatgagattatatagacctgaaatatacatatattttttacaaaaggattttaataaggccatgaatggcagagataggttgggttgctaaaatataggggctatactatttttttaagttggtcagtgagggcagtcaagtctttggctctctgaacaacagaatacagtcatatatatatacaggatatatatacacaatatgtatatatgcacacagaatatatgcatattatgtattatatatgcgttatatatgtatatatgtttacgtatatataacatatgtattatatatgtattatgtatgtattatatatgtattatatatattacatatataatatgcatacatatataatatgcatatattctgtgtgtgtgcagaatacagtcctgactcaattctggcaattttattcccattacatctggcattaggtagtagaaagttaaaccattaattttttttaggcctattaattttgaaattaggaccgtcttagaggcaataaatttcctactaggaagaggcttcatcttcagctttgttcagaatagtaccaggcaatacttgttaaacaaatgaatgacttagaggtaagaaatacaatccacctctgacaacttctgtgttattccaggaaattaaaagaaccaccccgatggctttgtgttttgtaatagcctgatactccatgatttgatggaatcatctataggagctgatgatgatgatgacctagcaatgcttctttaaaccttttagaataatcaaatgctattttaaaacctttagtgcttatttatttatttattgaattatggcacttaactattgcctttacaaaatttgtcatctgttatataaccaagcctaattgcatcttcttggtaggagatgagaaagattctgcatttcaaaggcaagcgctcttaaagtgataaggtaaaaatgccaggtcagcacaggcagagttaaagtaattttaagggttaattctatgggaggctgatgtagtttttgtcacttgattcttctgtaacatactaagaaagtgagaagggagataaaaatcagaaacagggctgggaaaattcaggttaatgcctcatcctctctggacttctcaaggatctgctccatcacagagtaatcaaagtttatcactttcattttaaatgtctccctccatagagagtaaaggagagcagggaaaaggagtttccattaccattaggagtcctgtttattacagtttaaaatgtaaaagccatttaaaatttatatgagtaaatatagcatcactttattttttaaccagggcaggttaagcaataatagtttgctagtattactttaccccacgtagaattctataggatgctacctgaaacacacattaaaaaattaattttaatgggctgttttttactttctactataaccattgtttgaagctcgttctccttagtttgtcactggcttggttcagtgtgtttcctcatagttaatggtattcaattgtgatttttgacacttggatttgattcgtgtagctataccacaaagtcccaggaaaataaaattaaagctagtgtcatagtctcactgagtgtctacagaagtatcatattgattattccatggtttctgatttacaggattaagcaatgaattatttactactatattattcctggcaaaaacccatagaattccttttttattaatttgggggtactgaaagtttgataatatggctttttacatttcttacataggaaaaacagctaattcattttttccacattaattcactgaagtcttggtctagtgatcaaatttgaatatgtagtgttgaccaattatagggtagagagatgaaactcgaggtgtttttgataatgagtcttttttacctggcaagaataaagagaagttcatggaatattttaagtaaatccttcttaaacaaccaacaaaaattctttcagaaataggttcctatggacttatgtaattaaagcctctgaagaatgagaatgaagagtctcaattgcaatgcaagttggccttctttttattctcttcttggaatgttaggaatagatcatccttatccaaccccttcattgtattaaaaaagaataaaagacagcatagaaaacagacttattcaggatcacagagatatttaacagcaaaaggagatatgaacccaggttttttttgttttttttttttttgtttttttttttttttgcttcattcctaccacagtgcagttccatctgtatctgaaatgttttttgtgtgtgttttcttttttgttttttgagacagggtttcactctgtcacccaggctagggtgcagaggtgtgatcttggctcactgcaacctctgactcctggactgaagggatcctcccacctcagccccctgagtagccaggtgcatgccattacgcctggctaattaaaaaaaaaaaattttgtttgagatggagtgttgctatgttgcccactctggaactcctaggttcaactatgttgcccactgtggaactcctgagttcaagaagtctacccaccttgaactcccaaagtgctgggattacaggtgtgagccgctgcgcccagccttactctgtatctgactatatgcttgcaaatgtttaagtgagattcttttgcttataaagaacagaagctgaaggaatggtatgaggcctaaggagtgagggattctatggcgaagaactagaacttcattataactcagcctcgaggagatggaattgtatgctgagcatctctgcgaatttaagcaatgcgagtttgtggcttttctctctggtgtttctacctttaatatgcttctgatagttttaacaaaagttacctaccttctcacctctcctactttcagactccgcctctttataattccaaactttgacctgtttcttgcccccacgtggccatattcttcatggcaatttcaggcattctttcagctttaacctctactgtatgattgtttccttggttccccagtgaaattccgcagaccaagaatcctattagcaaagttgattgttgcatattcattaaaagacctagagaacttacaaattatctgctgtctggtcatacgtccactgctgcctcaactagggagggtggagccggaaacatagctgcccggaagctcctctcttcaaagtctgggggtggagcatgcagctcacctgggcctgtggcttggcaggcaccatgattgacaaggccagtttcctgtacattagaggagataccctttttgctctgcaccttagagtcctagttatagtgcatccagaaggaaaatatgtaatcatcttgatcccttatcctcttccactgctatctaagaatttgctatattctgttcaatgcttggttgtcaaagaagcctcagttgggttctgagctctccggggcttagatgcactgcctttgtattgtctcattcctgtctccctaggaatcagggcagacgttgcacagaaacactttttctgagagaaaaagggcactttctactgggtttataaattgccgcaccactgaaccatgtcttcctaaatagatatttaccgttgacttgggctgatagagagtagaattctcaagaatttccttccctccctccttccttccttccttccttccttccttccttccttccttccttccttccttccttccttccttcctttccctccctccctccctctgtctgtctctctctctctttccttttttttttttttttttaaatggtgtttcgctgtgtcacctaggctggagtgcagtggcaggatctcggccactgcactggattcaagcaattctcctcctggattcaagcaattctcctgcctcagcctcttgagtagctgggattctagacaccccccaccacaccccagctaatttttgtatttcttgtagacaaggtttcgccatgttggccatgctggtctctaactcctgacctcaaatgatctgcccactttgggctcccaaagtgcttggattacaggtgtgaaccatcacacccggtcaagaatttattgtttcattgtggattctagaaaaaaaaaaagttgttaaaataagaacatgctgtcaaactattacattatgtagaactccccttgagattttaatttatattttctatgaactatcagtcactttattaatttcattttttcaccttttctatgtatttccaagaagctcatggctatagtttcgagaatttctatacaggtttccttgatgaatgatccttgtaggttgctgcaatctaattatcctaattttttcctatgcagaggattccttgtgattcacttaaattctcacacagttactttttgtatgttccaacatgtttagaacatattttgatacaagattctaagagagatggggaggttgggggagacattcgttggaagctgtttactttctccccagatgaccttgctgtttggcatgatgtttaatctcattaaggaagctatagtaattattaaaataaaattagatcataaaagtcttctgcaatgaaactcattgtttagatctatctggattagtgactaaatataaacgaaatgattaaaaaattaggaaattccccttgaaacagtatatgcttgggtgtaacagtggccatacttatactgttttcaagcacttagaaaataatacagtcaagcattttgccaacctacattttagaaatgtaggtgttttctgtcttttccaatgcctttcaacccctactttattcagaattagagaaagtaatttatcctgtagtagacatatatcaacctatgcaatctgctaattacttctgggacaatgtaaagcttacaaagaccagttgggttttcatataacaaaggatctcataggcagtaattatgtgataacttatgagtgaattcctttcatgaattcgtatatgacagcagaaaaggccacatacatcatgtttacacaccctacacactatatgttcatttgtatttgtggtttatttggctcagtctgtatataggaaaccttgacttagcaattaattcttagctaacaagctttgtgaaaactcctgggctttagagtagggaagagaataatagactttactggtttccaaattaattaagtaatgctttcttttaaaagattaatataggaaaatatacaactaatcaatcatatcttctcctaagttttcttttttaatcagaagaaaaattatttgaatgagattcaagttcccacaggagcaattgggcttgtagcaaaaaaatagctgtttcatttgagatgagcagaaaaatattatttttataaaatttaattaaattatcaattgcagcttttaaaaatagactcatactggtaataggcttcgccttaccccctttcccaaattgataatgatgttagaaatttcacaatattgggaaacaacctgcagttatgttgaaaagcatgtaaaatatgttttataatttgtataacagtctacatgtatattgtattatgtaggatgcccaggaaggcaaatacatgagaacaatatgaaagcaatagggtagatttgtcttttcaatgtatggtatccatcctgtctacactgtttattaatttcaaaatttctcagttgccttagagtaagcattcattatgaacaggaagaattcaggtacttaaagatgttccttaagttatctttataactgctaataaataaatatgtccacttttaaatcttttaaagaaatcacttgatcaaaatttttgtatgtacagcagtgacatataagtttggtaaaaaagtcacataagtgaatgttggaatacacacagacacattttatgtatgtttgtatatactgtatacaatgtgcatatgtgtattttgctacataattatatttagtgtattatgatcatgatgaaattgcaaacatgttacattcataataattagaaaaattcctttctagaagatatctttgagaccatgcaactttttcctgagaccagaccccgtttattaagaaagaattcaaacattacaaatatactaatgttcattatgtttacttgcctgttcagcataagttgctcagctgtgttcagtttctgataattctaaaacctcattaatttgcactaatgaaggggctgtcctttataaattaacaaatgtaatatgccaaattactatgggaaaatatgttgcttaaataaacatcataaagattgcaggatttaatgcttttttaaaagtctgtaagtgtaatataaaattactttcaatttacttttaacaaaaggctgttttccaaatctataaattctacccatagcacacataaaaatgcttgctgagtggttttaattaaaaagattaactttcttactagcaagattctttttacaatgaagactcctttggtgtagaagtataggttaacttttgagcttgtatttcctccagggttaattcagaaagtttgtatttgaaaccataatcattaaagatattttaaggtctccaagataaatacctgattttaggaagaggagttattttaagttgtctctgtgtagatgcctctttgtagtaacctcctgttctggtatttttaggtaacattcaattaaaaaatgaaacattatggttaaccttccctctaatctgaggtattttttgctggagatagaaaagttctgatttttttttcttcttggaaggtcacagtggacagctactttgtttgtcaaaaataaatttgaaaagagtcttgatatccgaattgggattgggacttctgcccagctctagttgagcaccttgggtttacgacttcatctggttgtaatgtcattgatgaatcctgaaggacaagagaaggaagcatctctcttagtgtaggtcctttgtttggaaacatggcccttctagatatttctagagaaggacacacactttgtatctctaatatagtttctttgagattacattttctcaaagaagaacaatttcattttctgcagcccaaatcaagaaagcttgttggtgctgcttcagaaacagatatcttcatattaccaattcggaatatcctctttctcgcctgatgcttgagaaaatcctgagaaaatgatgtaccctcacatactaattcctttcagtgagccccatttttagtggatgtaagagccaacgtaggcaactttgatgtattgaaaccaagcttactccttgcatagtttgccctcctaatctgtgattagagaggatcatccacacttaatttgcagcagaaagacacatttggtcttactaaaggtttattgctaatcacttgttcttaaacattgctgctgagtctcacatgactttgtttccctttcaattccacaaaatcttttgtccctagagaagcttcagagtttgaagaaatattggcgcttaaattgattctgcttacctgctagactagtccaatcttggaaaccctaaatggccatatctgtatttaaagatgattatattagtaataaagttttctactccattattaacagaatattaatttaaacataaaattatatatgacctgcttaggattctcggttagatctcataatttttgtacagtagatagtatcgcagtagattcagcttatcttttgtcctggttagaaaatgtgaactaccattaagtcatttggcaagacttatgacacagtgaaacttgaatgatatacatcattgcatctctacatctttccaggcttcataaaactgtacctttccaaaagtgttagattctgccaaactgaagcccttttcagaactgaatatggaattagacagtgtaactacccattccatcataaaggcagtaagaaaacaagttgaaagtttgaataagactgtcacaatcctcatgaaaatgatgtatccagaagtatacaggttggattcatccttcatttctttgggtgggagctgcatacttactgcctgggtagctaatgtctatcatatgataagcacctgtcttcattctcactggcaattttaaatagaattcaatgccagaacttgatgtttttcaccaatcctaattagaaacatggcttacttttatttttgaacaaaaatgtacttgttcaaagatctgtaacttaaaaattcttactacagcttggcaatccgatagctttgactttcttagttcccctatttcgacttttcttcctgagaagcctactgcctctttgacataaattcttcctcactgacccaagtggaggcagtgaatgcttcctaattattttagcacagctgattttatgctctttgcataagaaaggagaactatcaatttggactgtctttctgcatttctcactctctgtatggttaaagcctggacttttctcactcccttgcaatacttccttcctttacacttaacttttagttccaaggcaggctgtggtacctgctcccggcctcctgtttatatatcataatgtcctatcacctttttttttcagagatcatcactggtatgccagcctcaactgaaggagcatatgtgtcttcaggtaaggaaaataagcctggcaaattttactaaccagaatgacaaccataactgctggctgctccttctactaatcagaaccccttctgcatccagacctctcagctgctcttgttttctgcttcaatatttttctcaaccttgttctgtctttttggattttacttaagggaggatggttcttgctgtgtcttcaaacttaggcctgagaaacatacatgagtgaaagaaatctatatctaggtgcaacttaatgacattaagcaagtaaaggagatatatctgagttacaagctcagtttttatgtctttccaggtgattctcttagctgccttctactctttcacccctcagagtgtattcctgggtaatttgtcaacatctgatccgtgacctttgggtttctaataatcagttgtggatcgctaaacttaacaaaacaaaacagaacagaacagaacaaaacaaaacaaaaagacttacagcctttaaaaatgctgttgtctttgttttggttggtttctcacttgcctgtagtatttgctgatagcacttatagtctgagcagatattagcaacttagaacccaactctagcaatgcatatataaccataattcattgatttcttcacaagctatgaatttaatctatcctctatgtatttcattttttaaactttttcttattctttgtaatgctataattaatagagccttagaacatttaaaaattaatctttatttggaagaaaatttttgaagacccaagattggaaattcatctcagaggtacaatggtaatttggttttgcatggtgccttttcttttacaaaaattcttaaatttcatttgataatcacaataaacttgtgaaacaagacatcatttttcctcattttacagatgagaaaactgaagtattagaaatgttaagtcatatacctcaggaagtagaagagaaggtatttcaagttcgatattctttttattactccacatttaatattttagcttcattgagtttttcattatggctggtaccttgttgaaactatagaatgacctataatcaacatgtctttttccatcttacctccatcatttcctcttcccttcaaagccattttttaaaaccataaaagctaaacatctctgtatcctagactactttagctatatttaggacatattcatatgtcattactaagatataagtgtatgtgtgttgcggaatggtatgatcctggagtctaagaggttgttactcttctgaggaaaggaaggaaggaaaaaagaggaaaagagagagaaaaaaagaaaaaaaatcacatattctaaatttcttcacctttcatttacacgtttctgtaatatagggacttcgttatctgactccagtaaatgccattaggaaaaaaagagcttttacatttatatggaacttatcttgggaaattgactataactattatttcttaatatgtgacttgaatcttgataactttctggctgttgactttcaatccttctttgatactaagacttctttatttcttactaatgaaaacccatccgttccatgcttttttcggcatgagtcatatttttcattctctctgtacttaatgactgttttttcttcttttatctttgctacctgagaaaatcttgctactagatatccccaactattgtatgatttatttaattagcatggtttgtttgatcctaatgtaattattctattgctctagcagactttgcatggacttttcagcactttctggtccggatgtttatgcagatccaagttgcctggaaatactctcaatcttgtttgtttatttatttggcatgcatgaaaattggctttcactctcttggaatccaggggctattctctttggtttcatgttttctcaaaatcaagaccacatctgaaagaaggaattttctttctcacctgtggtgtgtatctcctcagagtagtctctcttggaagttcagataatgcttggtgtgtgggatattcttacagatggattgactccattttcatcccttttaaaagtctttgggtctagactatggtaatattcctttgtggtctttgagtattgcattctgacttataaatgcttcagcttctctgttgcacggtgttctactactcttttactaggcgatacccaagcctggcaaatttctaatttatgagtccaagcagcatgactcaataaagcctcattccacttttatgttttatagagtctcccattagaatatcagtatccacagaaggagcaaatacttcttcatgtaagtatacttaaatattctattcactggtttttaacccaaggcactatctgctttggaaggtcatgttcacgtctatcttctgcccctattaagggtcagagtattgagtttggcaataggtggtatttgctgtttggagtagaaatggcctcctaatatgcttaaggacaactagacatcctgtcctcccaatatacataagaatattaaaatacaccacaaatgtatcagttttagggtaatctggtggctttgaatattgaaaaataattgcacaagttctgaggcctaattcctggcaagcagtagagcacattgtgtgtcttttcagcttctctggatgccttcagcaactgcctgaggcatgatacccagctgtttggagcttccgttccaaaacttcttcattctcatataaagttagctgtgatggagtaagaaaactatatatagatgcccttaattcaaatttgatagcaagtaactgattatgaaaatgtttgaaagcaagcccctaggcaagatctcagattagttttcgtctatttaatgtgaaatgggctttgtgcttgtggacttctataactgttagattgattggggttttgtgctatgtcgggggaacttaaaatattagcaaggactagtataaagagtttttgatacttataaattgagaatatcatcgtattaaattttgatactcaacaggggagtttatcaaaccttgaaaattaaacttataactacagtctttctcttccttatgttagctccttatttaaagcatttctcaatttgataagctcttcaataaatagatgttcctagttattctatttcgatctggggagtgtgttgaaggaacaatttccttttgctatcagcagggtaggaaaactcatgaaaagaaagtctgtccttttggcaatttaagttgttttgtcaatctgtttaaataaatcctgtttgatgttacagcctttccctccaggttggtgatactagaactgtaactatatggtataaaattatcttttattgtgtgaagtatggtgttttggctatattttaactacataaagcgtcatttaactggattgatggcaatagcctggtgagatcaaacaggaaatgaaatgctagaaagggccaaattagtttcctatgtgttccaagggctctcatcatatcctccaaaatgataatttctgccggggaatttgtgctatttgttttttaattctacttataaaaagattagtataattatatggattttatgtagctagcatccaggaatcacattgagctttttttttttaagtgtttattctgcagaagcaaatactaggtttttcttttttggcattttgtctggaaataatttctctcctgtgtgattcattgaataaagttattgaaactcttgtaattggaacccttcatgctatcatcaatgggaccatagatactatccttaagcatatctgagcagtttgagaatgtaaaaaaatacttttggttttcccaagctttggggaactgaaataaatctctcagtttatgtttctattcattgcattatcactgagagagaaataattatgaaatctgactccattccctaattctcagtagaattagtttttgatatttggcaatggtttaaaactaagaaaggaagctttgtgtaccatgatattaaaatatttcaatgtgccattttcacacatcagtcacccggggtcatggtaagttctcagtaaatatggttgaattgattcatgaacacatttttttgtggaacttaattttattaggagaatataaacaatgaatataataaactagtaacacgatatattagaaggtgctacgtagtccaaaaatgagaaacagtagaggaggggaggggataaggagagttgaaacttgtgatttttattaggttgatcaaggtaagtctcattaaattgttgatatttggacaaaaagtggaaagaagtgaagggttaactttgcaaacatctagggaaactggctgggcatggtcgctcatgcctataatcctagcattttgggaggccaaggcgggaagattgcttgagcccaagagtttgaggccagtctgggtaacattagtcagacctcagctctacagaaaattgaaaacttagctggacttggtggcatgcacttgtagtcccaccttcttgggaggctgaggtgggaggatcacttgaactcaggaggttgaggctgcagtgagctgtgattgtgccactgcactccagcctgggtgacagagggagactctgtttcaagaaaaacaatcaaacaaacaaacaaaaaaacatctggggaaactgtatttaggcaaagaacaggctgtacaaaggcccttagacaaaagcatggctcatgtgccgtgtaggggaccataaggagccctgtggggttggagtagaaggaacaaagggatgaaatatagaagatgagggccacagaccctggggtctgagcatgtagtgccttgtaggccattgtcaggacattggtatttaatggaatcactctggctcctgtgtgaagaatggctcactgggaggaagggtagaatccaggatcccagttaggtggcttttgctgagagcatagtggcctggcccaggctggtagcagtagaggtggcaaaaaagtcagtctgtaatagtttgaaagtcaagccagcaagattccctaaccaattcattgtgaggtgttagagaaagagaaaagccataggtaaaaccaaggctgcttttgtttttggtttttaacttttggtgttccatttgattttcttctttggctttttcattatacttcttcatattaactattgttttacttgtttttttataattacaatatgcatgttttactaatcctagtgtgttttttaaaattttagattcagcgggtacattggcaggtttattacattttttaatctcatgaaaatatgctcttcagtttgaaaatataaaccagtcgtggcaggaaccaggtccagtcttagttacaataatgaaaatagcatgaagcacacagtccatttcaaggcagccacacgcaggacttgcattgcagggaacgactgtgaggtacaaatatctccatttagtaaaggctgaaggtgaaccttgaagagtcagcaataacaataagccaaactcaaaaatgccaaatatataaaaaagtcaaaggcctcagaaaagtttgcctggtcaaaaataatcagcttcaaagaatagatttcttttcactttattttagccagcaaggagatgctagtaaatccctgtatttgaaaagcgaactctgcttttctaatgtgattgtgcctgtaccggctacattctttgaactaatgacattggtgttttctaaagtaaatgttgaaaagcctctctgaagtagtatggattcagcaaacattttatgtattaaacagttctctgcgatttgggggtcagtgtaagacaggggaggctttcagagcaaacagatataggcagaggagatggatctgacttcacagcccccaaagttcccttttttcctctttaactcatgttggattagaagaaaaaaaaaaaaaaaaaaagagcaggcatggtggctcatgcctgtaatcctagcactttgagaggccaaagagggaggatagcttgacaccaggagttcgagactagtctgggcaacacattgagacctcatctctataaaaaaataaagaaattagccaggcttggtggcagccctgaagtctcagctacttgggaggctgaggtgggaggatcacctgagcccgggagtttgaggctgtcctaagttatggttgaaccactgcactccagcctgggcaacagagcgagaacttgtctctcttaaaataaaaacaaacaaaaaaagaaagaaagaaaaagaaaaaaacaaaaagaagaaaatagaagtcactcacctacccttctacctacttaatatattataagcatttttctcatgtttttaaatagtaatcagaaatatattttataggtcactgtaacaataaagaaatcattcttgactggaggtttttaagggattttttcatttacaaacacattatcggttttgccccctttctgtttatttttcctaccacttgtaaatattagtgaaatatcaaagttcttagtccttccctttgtaagacaatttttactactcaatttttggaaattggaaacttccattgttcattcactagtttagagttgttaattatatttttaagttctttatactaatctaataaagatcaaaattataattttctttattttcttttgttttttgtaaatgaggcatctgtgactaaaaacttataaataattgcctaaatgagttttctattacatgtaagtgacaagttttaggagaagaacttgaaccttacaaaacagtcaataggactatcttgctgctccttttatagaatcagcagaagtaaagtgattgtttggaacaagccttaatgacttcttctggagatgccagctgctggtagccccattttgcagacaattctgttgaataccataaaaaattgttataccaaccactttgctgaattaagcaccatccattccaatttaatacataaatgaggaaaacaaaacggaaaatctaacaaatagtaataggaaagaaaatcaagataaatcccgggaaaacagttgaagtggtaatatctgtttcaaatatgaataacagcaagcatttattgaaggcttactgtgtgccaggtgttgtgctagatgttttacatggatgatgactcatggttatcatgaaaacttattacactgtacgttgaaactgatacatgttgtccaaagtcacacagcagcatttaaccccagataatgcagtggactgctatgtcacataacgttttgctgcctcaaagaaaaagcccttactattgaaagaaatgggattctgtgagtggattgaaaggtagcctttggcaccaagtttattgggagtatatgtggtggattcaagtaaatgacttgtctggggccagttgtacccaagtgatcttcatgttacacgtcaaagcatggcaggtgaatgaaatgggaagagcacaaatgctgagtggactcatgctcttaagtctaaatactaatgctgaggacaatcgcggtggctcatgcttgtaatcctagcactttgggaggccatagtgggaggattgcttgagcaaattgatcatttgagcccaggagattgaggtttcagtaagtcatgatctcactactacactccagcctgggcaacagagaccctgtctcaaaaataataaaagaaataaattctggtgctgctaattaccgtataattttaaacaaattatgtgacttccctgagactcagtttcatctctcctctcctctcctcttcttttctgttctgttcttttcttttcttcttttgacagggtttctctctgtcacccaggctggagtgcagtagtgcactcatggctcactgcagccttgacctcctgggctcaagccatcttccttcctcagcctccctagtagctgggactacatgcgtgtgccaccacacctgagtaatgttttttagagacagggtttcgccatgttccccacactgctattgaactcctgggctcaagtgattcacccatctcagcctaccaaagcgttggaattgcaggcataagccaccatgcctggccccgagattcagtttctaggtctgaagaatgctatttattttaaacatatattgggaagtctaatgtgagaaaatgcatgtatatcatttagcacaactttgctttaagatggtcccttcatgtatggaagagagctagtgtgtggaaaagtgacatggctctaaaaagagaataaaagtcagagagtctctacatcttacttcaacaacgttggaaaatgcccttattgttggagaaggaaacgagtttatgattttagcctaagtgatgatgctgacagttctttgccaggaaatcactatgtcttttcaaaatattatatattctcagctaaggcttcattttacaggaactaatccaggaagtcttctatgaaatctctgaatgaaatgaacaattcagtttttaatttggcacctaaaaaagctagctgaaggaaaagaatgtctttgcagagacatttctgtcataatgagatagaatggtttcacttgggaatagcacactaatatgtattgattagattggaccagatctgggtggtccattggtggaatttagacccatggctcttacattctaccctcagttgtaactgacttacctgcttttatggtagaaaaaaacttctgggagcttagctaaatgattcttagctggaaaaatgccatttcaatttcagatgtttattggtcataacatgtgaacctctcctgccactgttggagagctacttttaattgaatgcaaattgtgttttcagatttctataaacatggcatttttcatgggttggtggctctgcccactgtggagaatgacaaacaaattatcatgcatcatatagcaataaaataataattcaaaaagaaaattgccctactcatattacctcatctttttggttggctggagagttacttacagatttttaggatactagagtgacttggtgcaagagttggggctcgtatattatagccattcataggtgcaagcaagttactgccttcacaatcagttcttttattctgtatatgaatatatcttctttttcttttttaaacaatactgcttgcgagtataatttatttcttcacttctgcctttgccctttctaaagtcattcactgtctatcattgcattccaccagtggaggagagaatctaaaaagttttgattaagctttgacctttcgtactggttgaaattaacgctttacagaattattcttttggaccataaaatatgtgtgtgcatgtgtgtgtatgtgtatgagatatagatatagatatagatatagatcattgatacttgcatcatactttacattttataaggcatattttcttattttgagtcatttatttatacaactcagtggcttagatttcatcccatggatgagggacttgacgttcagaaatctgtgacttgtcccaagtcaaagaacaaataggtagttctaaaaagaagagaaagtctactccttatctaaacagcacattttagggaagaatctgattggccctgattgcatcatgtctgaccctaaaatactgcatccagggagattaatgcctccagctgagtgggggctggggcacatatccactgctgtgtgtgttggggttagtgagggcagatgggctcagccccatgggaaccacatggtgtagaatcattacagagaggagagttctgtagcaaaagaagggaaaagtgagctagacaggaaaacaacaacacaatcattgacaactgataagcaaacaaccttagaaaaatcagaaaataggtattagtaacagaattttaaaggaaaattaaaaataggtgttgttgaaaattgtgtttcattgggcagacaaaactaagcaggatgagcaatctgaagaaaataataagctggaaaactgaatataattgcagtatcatttttttaaaagactcattagtacctatgagccattataattactcttaacagtgccctctttttaacccaggaaattctgcattttgaaagaaagtagaaaaacgtagacaaatgagttacagttttgaaattagaatgcatgggaagcattttgaaatctgtaaaatattctacctttgatgtcaaaagtcagagtacttgatatggatcctttaaaaaaaatccatgattgaggagattttgaaaaattcctagtttcttttaccagagtaattgtatgttgattagggtttgggtgttttttgttttcaatttggaaagaaaaagagcgtgcttagcccattccatataatattgtatagaaaactcaccaggtcttgttcaattgtgagataacactgattgaggttttatcagacttatagacatcaccatttaaacctaaacgaaataacaactccggtagttcatctgtgggcatcttccacttttctctgtcccactctgttataatgcacctcccatacaagctgtgaatacttaattcatttctttaataacttgctgtgtatacatagtttagctaatcatcaaaagtgttggaatgccacttttcattttatctcttagtctaccaaaggtcagcaaactctcaaaaaccaattaattgggtcactgtggcttatagcctagagctatgctcatctttattcaagtccataaccatctctgatttcaggtttggtgtttaggttgaatttatccatcaacgatgggctctttggtttgttctttgctgaggtattctagcactacctcttgagtgaataccaaactttaaagagctttttaagaaatgtcagaaggagagagcgagagagagaatgcctggctttgtgaaatgttgcagaaatttgtatttgtaattatcacaaatttaatcagtctttcctttaaatttttaaagcaattttggactattctcattatttcaatggtagggaaagtaacatatagatagggataggccaagtgacacttaaggtcaaatagcaagtgagtggtgaatgtaggtgaattaaaattggatggccctgtttttgctgtttgatccttagatcactgaaaactttccctctctttttttttttttcttttttcttttttttttttttcttgagacggagtctagctccgtcgtcaggctggagtgcagtggtgtgatctcggctcactgcaacctcggcctcccgggttcaagcgattcttttgcctcagcttcccaagtagctgggattacaggtgcgtgccaccacgcctggctaatttttgtattattagtagagatggggtttcaccatgttggccaggctggtcttgaactcctgacctcaagtgatctgcccaccttggcctcccaaagtgctgggattacaggtgttagccactgcgcttggccaaaactttccctctctttaatgaaaatgaatagataataaccaggtcctactatatttcagcatgaggctaggaaatgtgtatgcatatttcttgggaagtgggaggtgggaggtgtaatgattgggggagataaataggaaatagtccttgggctgaaggagttcgcagcaaagtaaaaagtttaattgtgattaattgtgcataatgacacgtaatcataatgggaagtaaaatatggcaagaggaagactttcaaattaagtttttttttttttttgtaatattccttaagatagaaaagccagccgggtgcggtggctcacacctgtaatcccagcactctgggaggcagaggcaggtggatcacaaggtcaggagatcgagaccatcctggctaacatggtgaaagcccatcgctactaaaaatacaaaaaattagctgggcatggtggcggttgcctgtagtcccagctactggggaggctgaggcaggagaatggcgtgaacctgggaggtggagtttgcagtgagccaaaatcgcgccactgccctccagcctgggcgacagagcaagactcatctcaaaaaagaaaaaaaaaaatagagaagccatttgtggttatgtaatttaaaagaaaattttggccaggtgtggtggctcatgcctgtaattccagcactttgggaggccaaggcgggcggatcacttgaagtcaggaatttgagaccagcctggccgacatggtgaaaccctgtctctactaaaaatacaaaaattagccaggcatggaggcacatgtctgtaatcccagccacttgggaggctgaggcaggagaattgcttgaacctgggagcggaggttgcagtgagctgagatcgcaccactgcactctggcctgggtgacagagcaacactctatctcaaaaaaataaaaataaaaaaggaaaagaaaatattattattattactatttttattattattattttactgttgtctgtctcctaaaatagcaaattgttgtttctacttcatatttataggtcattttactaagaaatcagaatcctgaaatttatctcattttaaaagatgatgacattctataatttaccgtcaagaataaaagattagtgatgattgaaggtgctggaaattaatttacactaaatagcattttgaaaatagtttggggaactttctgaaatataactagaaacttttagaaaaacatgactatagtatggtaagttgaatcattgttgatgagcagacacttatccttgatacagagatggatttgcaaaggctatgttacatatccgaggagatacttttgtttaggccatctggaaatgtgtgtatatgaaaaggttgcaattttatttttttaatagagaccaggtcttactatgttgcccagacaggtttcaaacttctgggctcaagtaatgctcccacctcagccccaaagtgctgggattatagacgtgagccaccatacccagcttgcaatttcctgaacttgttttattcattaagtaagactagttttgttttttaatttttattttttaaagacttgagttgatccaaagaagagagaagtggtaaattttaaaaaggatgcctagttataatcaaggaatccagtaaagtaaattaatctgttaaaattataaaacaaaaattttgcctgtatgatcattcctccctcaattttcttaaaattcatgtattaagagcagtgactaactgacaagaagcttctgtgccatttgataaagatttcaactacaaatgggaattaaggtatattaaaaaataaaattctgcatgacaaaatatttaaaatgttagtttttaatgttctacacaaatattgtcctacattttaacctagaaatctacgtattgaatcagcctataaaaatccatttctttcacaaataatgtagctttgagaacagatttttttcaataattctcagtctacaaagctatgaaaaggaagttgctgttgctgcattttttttaagctgtaaaatctaatatgccccagctctgatgaaatgtaccaggaggaacctgccttgtcaaacaggatatttttatgatgaaatgtgatacgaagaggcatagccttacatatatctgagagaaaattatttaagtggccataatagatttttcagaaattttgtacatttctcttatttgatccagatgcatttttttcctctgttgttctcataccagcttcttaatttcacctccctaatgttccacagcataaatacatctttgttcagagtttctccaagttatctgtgagaaaataaactatacaaagggtccctgggtatgttttaggatacatagattatgggggtgggagagttaccttgtgtgtgcaaatgagactgtatgtgaaacgaagataaggtttggagggaaatagatgattcaaagatacctaagaggtttattaagacctttaaaaatgattttacagtgcctgtaaagaggactgatatttaaactcattcagcttagtgaaaaaaatgaagaaaaatggaaagtaacatgcactacatgtgtacacacagaaacaagtataataaaactttctgccctttttttttttttttttgatatgaagtctcgctctgtcacccaggctggagtgcagtggcatgatctcggctcactgcaacctctgcctacccggttcaagcgattctcctgcctcagtctcctgagcagctgggattacaggtgtgcaccaccacacctggctaatattttgtatttttggtagacacagggttccaccatgttggccaggctggtctcaaactcctgacctcaagtgatccacccgccttggcctcccaaagggctggtattacaggcatgaaccaccacgcccagcccctgcttattttttaaggtttctagaacattggctgtgaacttttgggtaaatagtgcacataactcttctccttcctttttatttgaagtgcagacctgggtatattttattaaaataatggtctgaaattataaaaaatgttctttgtccaatcaaggagtaaaatcaaaccttgtattattttgtagttatactcagatgttagactatcttctagtccccagcagttcactctaggtggtcccatagctcttgcttgaaccacagtcttgccacttcttatccatagtgatgtgcacatcagttcccacaccagaatgtaaaatactagagggaagaattttggttgatttgtgtttctattcccataacttattactatgccagttcccagggagtatttattaaatggatgtcaatatcaacagtgagttaatgaatttttttgttggattatcattttttaagttgtacacatttacaatgaaaagaaaaccaccttcactttaaatcatgggcacagatatttaagtattttaaaatcaaagttttaaaaaactaacattggcttaaataatatttattagagaacttgtaacattttaagaagcattcacattctacctatgtatattttaaatttatttctgttttttacatctggaagatttttttcattttatcataaatacttgttttcatggtaatttataaaaatcagtttctcctttgataggattattacaaattatttcagaatctacttattaactggtcgctgttcctctctgtagtgctgaagaggcacttgcttgggaacaagagaagtgccgcaacagtgtcaataacatggatttttcatttattatctttaataataataatagatgacaataatatattttaataagcatctactatgtgtcagatgctttcttctgagaatggatattgttagtcccattatgtagatgtagagactgatactcaagacaattcaatatttgtcaagtagtggtagaagcaggatttaacctcagtctttctgactcttcatcctgtgttcttttcacccacagatggtagaggttgaaggctcagaagaacactttttgagctcagaaagctcttcttgtgacctctatgctactagtctaaagggcaaatgataattgcagctactttcagaaatggtcctttttccctaatgagatgaccaaatctgctttatgaacccagtttcctaagcaagatacagaaatagacacaccaatttagtatgataaaaggtgttaaaggtagaacaattttaggtaccaaattatatttatttgatacttggataatttaaaaataatgccacaaacttcatcccatctacctcccagtgcgcacacatttgggatgaagagataatgatgagaatgacattgtagataaaaggtatatgcattaaacatctgaaatgcttaggttattcaaagaaaagaataaacacaccatgtgatatgtagcctcagctacttcatgtttgaagttgatggtaacattcagatcagttttgagaagcagactgcaaccatagcttttagtttaagtttcagattgatatggaaggttatttgttttaacaatccctatgttaagttttcttttttctatgtttcaattgacttattttgtcagattttaggtttttttttttttttcaggcaagatggcattctcatccctgctgttgttaacatttaaagcatgcagcctcttgtgctgtggtgtaaattccaactgactgacgataattaaacagaaaatgaaacttgaatggcactatctcaaaatctacttaaagccacaacaggtatctgcctatagcaatatatcagttggaacacatgaagaataagaaattgtagcattttgtgtctgggtttatttttctttgaaatcaaagaagaaaaatactgatttttcctggatcactaaaacagtagtatggatttctaaacagggcagaccatacaaacacacaattaattatatctgaacttgaaatctcatactgtgcactttacctcttttataccagttgtaatttctcatttatgtacagatactgtagtaactttttttaaaaaaaagaatgtattattgtaattaaaaagcaaatactcaagaaagataagacacaaaggattaattgggattacaactcttctttctgtattgagtgcaaaagcttggtgatctcctgaattgtgcttcaacagtgacctcaaggctccttccaacccccaaggctctccttttttaacatttgttattacttagctattttatttggcagggatcccttctatctcatcttctaatgcactggcaatgatcctattgccaatagcttagagcctactgctgctggggtaagcgacacagccgaactttctagcctctgcatccttataaataatgcatctggtttcctgtaactacatgaactcttagactttagtaggcatttctttgttagtcagggtaaaagagttgggagatgaacagttgtggaaatagttataggcagttattatcactgattagaacctgagtccatgacatatgcattaatcactgggttaatgctaatggaatgcttatggtatttatagtagatataaataagatatagaaaaagaatatctttgctgaccaaactgcatgcttaattcaacatggaaagttctggtgaggttaatctaggacgctttgagactccgttgctcataattggacctgatttactactcatttaaaaaatctcttttaatttgcgcagaattcgctggctttttgggggtggacacacttgttcttaagaacaatagcaacaagatctttgtttaacataatatctaatgctccatgtaacttagtggtataacaaattattcaatttgtaatgaaaaaggtaaatgctgtgttaataagttaatagcaaagtaaataatgcatatttatacttttgacttcaaagtgtttataaacttatggcattaaaaagtaatgttttatttttgagcatcagagaaaatagtatttaaacaagagaaaccgatttttaaagtgaaaatcattttagcaacattttaaaataagccacgttaatataaaataagtgagttccatcgaagtatacactcttttcttcactagacgtgccttaattggacatgtcactggccaggcgtggtggctcacacctgtaatcccagcactttgggaggccaaggcgggcggatcacctgaggtcaggagttcgagaccagcctcaacatggagaaaccccgtctctactacaaatacaaaattagccgggcgtggtggtgcatgcctgtaatcccagctactcgggaggctgaggcaggagaattgcttgaacctgggaggcagaggttgcggtgagctgagatcacgccattgcactccagcctgggcaacaagagcaaaactccatctcaaaaaaaaaaaaaaaaaatggacatgtcacacagtgacaatgttcagtgttatgattctatcataaggataaaaaattcagattgatttagatgttgatgagaaacttgttgctctagagccttgtatattttcatcagaattaactgaaagaagggaaaattgtttctaatatgatacaggatgttcatcctgatcattttattattgatttctttagttaccatcagttcatctctgagcagctcattcatttagaaagatgatagcttgtaagtttaattctaaaactcattctcatccttgttagcatttgacatgccaatgattttgcagagctgggttgttatcaggactcatgtttagtcaaaatgtttaacacttatttctttgattcctgtagaatttccttattaattaacccagggtctataagcaacaaatttttaaatcagatatatatctatatgcatgtaattcatttttttctctttgatttttgactacttttttatgctgatattttagaatttctatgaaattaacacatttccttaacaattcaggaaatctgactaactgtactttaaaattgtgctttggtatcaccagtaaataagaaggcttcaattcatcaaaaagataataataaactgtattaatgctttcttttatttatttattttaatccatctaccaaaaacaatcaagacaacagctttaaaaaaatgcaatcattaaattactacgacagcctagtctgcttttgtggctgttttgttttgatggttaccgagaatggaaacagacagattatgtttttctgcttgtaattgtccagtacctccaaaggcctcttgcctgggcatgatcccttctggaattgaattctgcattcttcttctatcactaatcaaacaaaacactatcagaagaaaacatttccataactggatccggagtgaaggaaaatttcagatacttagacatgcatatacaataaacagtgtttcctgacaggctcattaaaaaagaatgactccactatgtgtcaactgcacaaatagaatccattataagactatggactcttacttctgaagtctgcctttgtgcccacctaagattaggaaaactaaatcttccactagaatttaaatatcacagaagcagaaacgattgcaatctctttccccagtgccttccttcctctttctctcagtcttgggtaggtcctggtacatatgaggcacttgcttaaaaaaataactgaaggaacgaatgaagttgcttaaggccgggagcagtagtctgtagatgagtcgactctcacctgtagtcccagtactttgggaggctgaggcaggaggatcgcttgaggccaggagttcgagactagcctgggcaacattgtgagatcccatctttacaaagaaattttaaaaattagccaggtgttgtgacatgtacctgtagtcccagccaattgggaggctgaaacagtaggatcacttgagcccaggagtttgaggctgagcaagatcttgtcttaaaaaaaaaaaaaaaaaaaggttgcataaagcagcagagacaggatcaacctagaatgtctgtggaaaaactttgaaaaagcatacattcttaaaaataaatgggaaatctgtggcagaggaaacagtaactactgacctgatcttcccttttcattttattttaatttctaatttgctgtaattgtatggtgctttcaaatactgattaaaactcttaaaaaaatgaaagagagaaatcacatttttctgctaaactgagtttgtggcatgccttcttccttcatcttgttgatgctcaaagaattatgcaacagagggccatcatactgtttagtatgttaaattattttgattcatgtacttactagcaacatcatttaaatggtttggtttcgtcatggccagacttaagacacatagcataattaagttgacaacctaatattccacattaaatcctggtgttggaaaaagctaaactgatcggagaaataaatctgtccaaagtagaaactgtaatatgtatgtgaacatgtatattctcatcatcactttttgttttcttcttttgttctctgttcctcctgttgagtcttgtgtaagtccaaataaaaattttattgtagagcccaacaacaaaaacaatgatctcttatgtaattgatgattttaaaaaatgctttgaaagtcttcttcccatactttgtatcagtataaagatattgtacagtggtacagaaaaaaatggcttttgaagttcagatggtttgaatctttgcttcaccacttactagctatgtaattgtgggttatctgtgcatctttttaaattctcactttttccatctgtaaaataagaacaatatcagttactttgcatactgattgtaaagattataaataagaactgatgtatatatattacttggcacaatgtctgacctgtttctgtttttcacagtcaggcttctcttccattttctaaggtgactcggaccttaccactctaaaaattcaaatcatgccttcactttctgcagattgcacttgttactttagaagaaaaggaaaactataagatggaaattattttaatgtcctcttaccaaatctacaaaccccagcacaatgcctgtcacagatacggtcatttagtaaacatcttttggatggataggtggatgggtagctaagtaaattaacatacagattaggtctttggaaatggtagctatttttattacaccctgtacagtgaccttaaaatttgaaatctactgcttttgaaaagcaggtcatcctgaggttttccattttgtacctgccagattgtgaaaagaagttcatttcaatgctgcacagcacatttcctgatcagttggctgaattacagtcatgccatttcattttgagttggacaattcaagcatttagccctgatttttttttttgacagtaagttagttatttttatactcattcaacacatttttcccccaccacaggttattgtaaaaccacctgtctctgggagcacagttaattctgtgcatgagatttctaaaaatgttttacattgtcattgcagttttttaaaaatgtagagatccctctgctattcttttgcattgccaaatgcttaggtaccttggaaaactgcttaattggttcttcttatctcactagattctttggccttaggttgtgaatgggtaacaatcatttaacttttgatgtgccctgaagtttccatccaaaacttttttctttgaatcttttttagggtgaaagagaagaatatgggggatctaggtgtacattgatactttttagatgcctttgatgtcagtcagtaaacagcagtagacatttggaagagcatgatagaagagacagggctaattccaggtatttaaccccaagttaaggagacttaacctgaggctgggttatttctctgatctctagggacagagtagtggcaaagccttaaggtggtaaaatttttgagaaacacttctaaagacttatgttttgttttagaatcctatctaaaagcatttcaaacaaattaagttaagccgttcctttcttactggatgtgttcgggcgcagggggtgggggcaaaaagaagcatatggttgaagctctgcactgcagtaatttgtaaaagaagtacttttcctgctaggttaaattgctctgcctgcctcttgctgtcagggacatgatttagttaaatacggatgcttttagaggggctttgtactgcatcatacatatttaatagtttataaaatatctgtgtgaatcactgggtggagaatccagcagcagagaagctcaaccttcacattggagcctctggccttagggtccactgaccagttgaccactggaaaaggtgtgttcagaatgggagcgtcctgaataacccaaggattctactgatttcaacagaataagcttagcatctaacctttcagattttttcagtaatgtgaactttacattttctcaagtcacattattcatagatgttctaattccccagggatcgaagtatagcattaaggaaaatcccttctcaataaaaaaatggtattgggtgaggggagggggacagaaaaagctcttagatgttctatagcaattaatggttgccatataaagatacctcattgtcattagataatggttaaaattatatgaatcttttacccttgatataattttgaaattcatcttaaaaatcaattccttaaaataaaagtagtaggggaaagaggtagtgatgggtggaggctgggggatgatgcagagaaggaaaaaaataagcaagtggaggttactaaatgtagcattggtggattattttgtttgtttggcataggtaatgagttttataataaaacttactatagtatatcaagataggctcctttcatatatgaacccagaaacaccatgaaaaattttttaaaaagttccagcattttattatgaaattttcaaacatagagaaaaggtgaattaatcattcagtaaacaaacttatgcccactaccaagattttacagttaatattttcctatatttgcttactgagtgtctacccatttatctatcaactttttatttttgatgaaatttcctgtatatatgagttcattttacccccaaatatcccagcatgcatagtatatatattttattacattgtttaagagaacatgtaggtcatggattatgctatcaaatagaatatatgtttctctcaaataagccaccatatttggaccgagggttttctagtcatcatatttcagagtataactcagacagtagcagccttcttgttcctgttccctaataattactccttcccctgtcccaggcttttaattctccaaattaaaagaggatgtaacctcggcttcctgattcccagatactgataatttttggtacagtttgtgtttgagctactgcagtaatgttcgggcgattcccattttggtgacagtcttctttcctgaggatacattgccttcctatcctctgtagtttctttattctatactttcctatgtaagcaataaagctaattgtaatgctcccacaattcaggtagcgtctaatctccagcctgttctcaggggaagttgttgggttctggagcacacattttgtgtgctcccttagtttgacaaaatgctgtttaataacagagtccaaatatgaatattagtctctgaatatctttcagaaagaggcccattaagtagagttgtgaccacaagtggtcgtgggagcattaaagagtaaactttcaagtagaaatggtccagggaaacagtcaaagtgaggtattggtacagacatcattcatggctctaggcgagagaaagtctaaactatctaatcaagtgtgtgtatctgagttggcagtatgcaactaaaagctttcctttgtagaaattaattaaaaagaaggagaaatagatgtgattcccagtcctgactttgaaattaatttctgtgtgactctaagcaggttttttgtttgtttgtttttacctcccaataactttttttcttcttgtataaaataaaattcatgtaatgggtgcagcaaactaacatggcacatgtatacctgtgtaacaaacctgcacgttgtgcacatgtaccctagaacttaaagtataataaaaaaattaaataaataaaattcatgggtaaggcctgttgcagctccaacattcagtcaataaaaaaaatttaaatctaattattattgagattacagttgacctttgcattaaacctaaattcttttactccaaataactactgaaatagaaagaaaagacacaagtctattttcttttttctcccagtgtcttagagatatggtctccttctgttgcctaggctggtctcggactcctggcctcaggcaatcctcctgcctcatcctccctagtagttgggatcacgggcaggagcgaccatgttggacagaaaagaaacaagtcattcttaaacaaatctgactctagcaacctattgtataatttatggtagaaacatttgagctggaggtcaaatcataagatatttttatcttataactttcaaattcatatcgttttaagtaataaaaattgtaacaattttctgtaaacagaaaaggtttccaccccttgagctgaaaagcagcaggaaaaggagattggcatttcattttaaatgggatacgtctgcttccatgagcatcataaaggttatgaccttacggtagtgttgcctgacaggtggctcactaagaatgccaaatcagttctggaaactgcatatacttttatttcttcttttttttttgttccctttggtgcaactttgtattttcattttgatcagcaacaaggagaaaaaaaatgtgtgtactctaaggaaaacgtatattgtaagacattttctctggctaaggtcttttcaggtttagaaatgtgaactggccaggcgtggtggctcatgcctataatcctagcactttgggaggccgaggtgggcggatcacctgaggtcaggagttggagaccagcctggccaacatggagaaacctcatctgtactaaaaatacaaaaattagccaggtgtggtggtgcatgcctgtaatcccagctacctaggaagccaagacaggagaatcactggaacctgggaggtggaggctgcagtgaggtgagatcgcgccactgcactccagcctaagcgacagagcaagattccatttcaaaataaataaataaatataaaagagaaaagaaatttgaaccatgtttaaaagtagaatacttcaggtaatccctttcctcaagctttctttattctgggaatgttgtgcaagtatattttatacatgggcttatgtgaagtttcagtctcttgaatagctggtactctcttatgagtaattcataactgccttcacatgtgtataatctcatgctcaactgtttctctctattttaagcaggagatttaaaaatcaaattaacacatatttctagagcatttgctataagtgatatgctgtgctatatactgactaactacatttctgggttgattgggggaccagtttatagaattggctgacaagcaactgaactttaaaacaaatagctagtgcttaagtataagtcaagttcaatcactcccatttttaaaactttgctgaatttatattaaaccgacattggttattcaaggtatttcttccttgtttttagctaaaacttctcttactgcattaaactacatccattatcattttcattaaataagattgcacattggatatgtacataaaagcaaaattatatcttgcatttttgttacatttgccagaagaatgaaaaacaaacaacagaaaatttctctgagctgtgctgctctatgccctgaacgtaactgtaatagtgaatattaatgagacacagcaaagatatttgctcaaggtagctaagccaatatgtattgctccagtaaatgttagaaatgaccattcatccacataacctcagattagtctgcataaagataatgtttcttttgttttttcttctttttgtcacacacacacacacacacacacacacacgcacgcacacacaccacacagtaatttaacattatttgcatttactcacactggtaaaacacacgtctcaaagatgtttcccatagtttattcatccctcttctatgtcgttttcatttggatgcatttgcttaacaatgtctgctgtgtgccaggcatgctctaggtactggggatatagcagtggacgcagacacaagtgcatggtcttatggagctgacattctggtattgagtttatcacgtttgataagaaaacacagataatacaggaagactgccatttgcccctcatccttggcacttatttccagtggagtccttcatcccaaagatctcagacccgcacacacacacacacacacacacacacacacacacacacacagaaactagtaaatggatatgtcattgagactctgaattcaaaaggcttctgagaacatgagcaaaggcttatctttctatcccattttatatactaaaatattatttttctgttcaactccatcctatttccctatttaaaatatacatatcggcaggcgtggtggctcacgactgtaataccagcactttgggaggctgtggtgggaggattgttgaggccaggagtttgaggctatggtgagttatgattgcaccattgcattctagcctgggtatgaaagtgagaccctgcctctacaaaataataataataatagttcaaaaataagttagccaggcatggtggcatgcacctgtagtctcagctacttgagaggctaaggtgggaggattgcttgagcccaggatatcaaggctgcagtgactaggattgcaccactgcactccagcctgggagagagagtgaaaccccgtctctaaatatatacatatatatatataaatatatttttatatatgtaaattaatatcaagttcagagttcatagttaataattgcctgagattcactgccatattgcctattgatactttctagaagaaagggtagccgacacataacaaagtctcatttttccttgagttgaaattcacacagcaaaattaaccatttgaaagtcaacaactcagttgcatttattgcactgttgtgcaaccaccccttccatctagttccaaaacctctccagtggaattttaaaagaaggacaacttgtaaaatgaccaataaactgtgtttgtagaaaattaatgattttacttatggagagtgagaaattaataggttctcccaaagtaaagcaaactcactgtaactatcgtatgcaattaaaatatctttccatatgaaattctcacatcctcatctttgagatcatttactgtatcttcagttacagaggatctaaactcataaagaacaaaatgtaccagagtaaattgctcatcgtgttacagaatgagaacacagagcacagtcaatatcaagtacttgatacagcatctcacaaagtaatgcttaaaattaagtcaaattgtctgctctgagaacattttcactgggtaagaataatcagtcttgactcacctttaaagtgggcagaaaagacatgcccaggaaggtaaaatgagtttcattcatctcacctattttgcatcataaataatgtacaagaacatcacacagcacatggatttggtttgctctcagagaacttttctatttagctggggagagaggaatgacaagaaaaaatagttaaatattagcatattccaaattttccctccactgataggatctgtggtagttgagtttcgctagatcaggctaaattaattcaaggcatactttggaacaatcagagaaaatttgataaggaagtatctgaataggccattaaaagacttgaaaaaatggagaggaggagtatagagggtattttagatagttggctatgaataaagcctgctgatttattagagaccccataatctgtgtaatgcaatcccaatccaaagtaaaaccaaacaaaatgtatgtattgaatggacagcccagctctaagtttgggacaatcaaatactgatagtctttgccttcaaataaattgcattcttcagccctgtatacacgatgtaattaaatgatgacacatgactgtgaacatgtaccccaataaatggtacagttaagaaatgctgggtctatgatttggaaaaatgggaagggcttcgtcaaggagctgagacctagctgagggcatgttttttggataggtggaagaagctgacagatccattggtgtactttatcctccagagaagctgcaagttttgaaagtcaacttcaggacatggagctttcttgtgaaaattatgatttcataattcctcagcaaataaataaataattgccatttgtatgtagggatctctccaaatgaaacgactgctgccatcatttttattttatgttagataccatgaagtaaattctactcttttgccagccgtaaaatttaggagcaagaataaactttttcagtgataatatttttagattttggagataatatttttagagttatattgccaagatacaggaaaaaagtcaaagagaaaataagtgagtaataaggtcaaaagcaaaatgtcatttatcattctctttcatctgttggagctaccgtacattcttctgatgataaagtaaataaaagtaaagcagaatgactagcttgaattcatagcctagcttgaattgatgtagctgaggaattctagtattttttatttgatgatattacaggatgtttttcttcattgaagccagcttagaaggaagctgaaatattatgaaagtggatcagaaatacaaatatattttactttattctgccaaatcccattctatattaccgtgtctcttcttgatccaggttggcatactagcatttacttccttatcctctgtggcagattaattgtggctgcaaattctttgccactttctccctcaagatttatttcttctgtccttgagtctgggctggcacggtgactgcttaaccaataggatgcagtggaaatagtttgttctgctttcaggcacagacttttaagagaactggcagcttgtgttttcttcttcttggggtgctttctctcacaacctggccaccatgctgtgggaagctcaagccacaaggagaggccacaggttggtgcaccatttcacagtgccggctggcatctagcagcagctgccggtcgtcatgtgggggagccatcttgaacgtttccacctagttgcacctcacctgcagcaccagctgacgtcaaatgaagcggaagaaccactcagctgaacccagtaaacctacagaataaaatggcggttgttgtaagctatttccaggtggtttgtttcacagcaatacataactgaaatcgcttcccaaggaaagtcctggaatgagaccatggaagagctcatttgatttaaatgataaatagacagtatttaaatggcctatgcttaattcttataatttctaaaaattattaggcaaaattgtagaagtcttattttggaaactagatccttttaagtttgtttacaaattatattaaggtaataattcctatttcattgttacatattctggttctcatagtctctccttgaagtggtatgtaatcaataatataatcaaatgcacccttttgatgaaataacaaaagcagtatttttcagcagaaataggatgaatcagaacgtactcaaatcttggccacatagctatgtgtccatggcaaaattacctaagctgcctgggccaatgaaataaaaaaaaaatttaagataaatatggactgtatgggattagtgaagatcagaaataatgtatattatgaacctagcagagtgcctgtcacctgggtggaactcaacaaaggtagcttttattattgtgagggagatggtgataaaaggttaggtagtaaaaaattgtgtagtttatttttctaagaggacatggaaatggggtgttcctgggctttactggggtggagcttaaagggttaaaatgatatatccttgcagtttttcctacaaacatgcatgttttatccaaaggaaattctgacctctaaccccattcacactttcctttcttactcttttattgctatagaggatttgatgaaggcagaaaggcaacttctgggtcctagtcccaagggtagaactaatggagaattcttttattcttcacctcccatccttctccatttccccatttacattctttttccaatttggcggaaaaaaagcaatgttataggaagctggctgtctgcagattagtcttagcaccaaggtggaatgacttttgggggaaaaacagacacatcccaaagtctggctcatgtagtccaagggaaagagtacttgtggcagtccataggattctctctctgatgtgttgtcctagtctttgtataaaatgttggttttctctgtaagtgttgggtattttcagtgtaacagctagagcaatgcccagtaacttttttttttttttctgctgaatatgtttgctcttaatggttgaggtaaggtgaataattgctcttggtgtaagttaaagaccacttttctaaactatgggttatcatgcttggtattttctcctatctgcctgacttgaggccacctgaaccccattttggtctttgaaatttagctgaccttggccttggatgaaatgctggtgtattgagtataatagttttggtttaggtcaaaattggggaattcagtgccgtatatttcaactgggtgctttttgaagaaatcataaattaccctagtttagcataaacacctgctgatattgtttctgaatatttacatgaatattgatcattgagatcttactatctttcaatttgaatgctttaaatgcttcaatagatgttttctacaccgtgaaattgtatgtcctttgctagaatctttgtaagagaggtctcactgctttgaagtcaaataaacctagaaaataagcataggaattatttttaaacaccatttactgtgcagattatagagagatgaactcaaggataactcatgttgctcataaacttgtcatagtcatggttacatttatgcaaattggcacaggcttttgttgttgttagttatagtactgcaaacacagtttaagatgttaagaccctttaaatcatgtataattatggactaatttcatcttgaaggaagaagtgataatattcttatctcctgccgtttaaagctgaaacatacctcaaagtagtggagattgtgccctacaaaatataatgtgcttaaagcggattttctcaggacttgaattctaaattttactgcttcagggactcatatgatggctatgtagtatagatttagagagagttttacagactcctattgacataagtgaacaaaatggttccttggaaaccgtttagatgtccaatcacagtaagtgtggattacaggttcagatgcatattgtgtgcagtgatgtgcagcacagtgcttggggaagcctgtggtctgtattaagaacagtgcatttcttctagtgttttaatgactgttgttttaaaagaaaaaaacagtcagcattgaaactactgaaaggtaaagctcctgaaacctaacccaaaaggcatgctctcatagaaaactcttcttagtactttcagtgcggtgatagctgaggacatgtggtatatattacagtgccagggaatccaaacctctgcagtgtggagtcaccatgaaaggctaatctaaaaatgaagtggtagctttgctcgcatcataactctgttacttactggtgcttcctattagcttgacattattagtcttctttgggtgagatagaataaatggaaattcaaaggggaccacagcaggggatatatgggctgccaacccctcccctagcactcccttcctccagcctgtactcagcatttctccctgggcatgacaaacaaagtcttacatagtcattgcaaaaagggctaaaggcagagctgtccatggttaggaaaaaaatgttcaaactgttggttgaaaatcaggtaataacagtcctcttagtgaacaaaacttattagagggctagggaaggaatgctatctctcagcagcaggcaggaagaaattgctgttgaaaagcttacctctctagggaggaatcagatagcagacttcaagcctcaggtccaacccataaggtcccacctacaccaccccccaccccatccccatcccagctttgttagattgctagcatcgatcgctggctttctctgacccaacagtgggtgaaggaaagagactgaaagctggcaaggtgggggtggaagaagactgggacagcttttgtagagaaagaaagaaaaaggaggaaaacgggtgggggccatggggactaggcttaactgatgcctgcctgcctctctttgatttgatggcctttattccttctaattggataaaataggaagtcactggcagtcctgtgtggctggggatactgattttactcagaccagcctgcagctctagagtgtgggtagagagcggggagtgggggttgggagagggggaggaaagagagagaggagagaggacgggcttggatgaagaagggaaagaaagagaaagagactgaagcagagaagagccgcagaggaagaaagtgaatgagcactcaagaaggacaaagaggagtagtcgggggtggggtggaggcagggcggggaagggagtgaccgcccctcctggctgcactcttgcctccggagccctctgatcctgtttgcagtgatgctccgagggcaggcacctgctgctctgtaatgattcagcccctttcagccgtcgtcgcgttaacacaacaggatgctgttgctattgtcactactgcctctcctgccgccgctgctgctgccgccgccgccaccgccgctggtcctccttctgcttttacttctcctgcatgacagttgttttcttcatctgagcagacaccagcttcagatgctcgaggtgagaaacatgcctttcagtttgggctactggtttacttaattaatcagccggcagctccgtcgatctattttcgtccctgtcctcttgacgagcccgggatggtttggagtagcatttaaaagaactagaaaagtggcccagaaacagcagcttaaagaattattacgatatactttgattttgtagttgctaggagcttttcttccccccttgcatctttctgaactcttcttgattttaataatggccttggacttggacgatttatcgatttccccctgtaagatgctgtatcatttggttgggggggcctctgcgtggtaatggaccgtgagagcggccaggccttcttctggaggtgagccgatggagatttattccccagacatgtctgaggtcgccgccgagaggtcctccagcccctccactcagctgagtgcagacccatctcttgatgggcttccggcagcagaagacatgccagagccccagactgaagatgggagaacccctggactcgtgggcctggccgtgccctgctgtgcgtgcctagaagctgagcgcctgagaggttgcctcaactcagagaaaatctgcattgtccccatcctggcttgcctggtcagcctctgcctctgcatcgccggcctcaagtgggtatttgtggacaagatctttgaatatgactctcctactcaccttgaccctggggggttaggccaggaccctattatttctctggacgcaactgctgcctcagctgtgtgggtgtcgtctgaggcatacacttcacctgtctctagggctcaatctgaaagtgaggttcaagttacagtgcaaggtgacaaggctgttgtctcctttgaaccatcagcggcaccgacaccgaagaatcgtatttttgccttttctttcttgccgtccactgcgccatccttcccttcacccacccggaaccctgaggtgagaacgcccaagtcagcaactcagccacaaacaacagaaactaatctccaaactgctcctaaactttgtaagtagagagagagagagagacgatgatgatgatgaataaaaggggtgggtttgaggtccccaaaggacatttccctttcttcttgcattttagttgcctggttttgtttaagcaaagcctatgtttgagatgcttgggatggcattgaagggccgagtaaaatgatcttgcaaactccggatctgaaccagtgttgtaacagcagctctctctagccacatggctcaatctggtaccgggaatgaaaaacttcagcatctgcaagtcatgcttgaatttaagttaaattcaatttatttctaacacattttaaaattaaaacatcacgccatctcttatgttttatagaaatgtgactttcatataccagtgagtattattttgtgtctttctcttccccatcatagatttcctgtcatctctctgttaccctctacctctcagcgaccccaagctgcctgttgtctctctctccttcccgttccctaaccacttctccctacttttgtatcttaattggttctttgagattacagcaagtcttaagacatttacggtgctagcctctcactagcttgagacgactgctgtcctgcccagatggcactttcagttagtgagcacttactagtggcagctttattttgtccaggacacagtaggattctgcatgaaggattttcccaaattagttttgtcttctataatcaaatgtttaaatagcttccttggcagttgttaaaaagtacaagatccattagtgaggtacatctttttttttttttttttttttgatgtatgtcatcttagtctggcagattgcagcggcccagtttaataacctgtgatgtgcagagagcccacgctcttaaaaacaatacattcctgtttgcattgcgtaattgcaatagctttagagtggaaagttgacaggaatgaaagcatgactgttctaaatatcaatatagaagggaggagttttctgtagccttttaaaaatgtttctagtttatttttgttgtctctatctcctatcactttttaccatgaggaatatttacttagtagaaaagtacaagatcagaaaatttggttcttaataacttgcatgaaagctcttagggttaaaagagagttgacaatttctctgacgaaatgcctcttgtttttcctctggacagtaatgaagaataaagaataccttttccagacatcatgttcagtgtgaagtagtgcagcatgctgtagaaacacagaaaaacttgatttgtgcttgtaactcccgatcatttcacgaacaccagattcagtggcaaagatttaaagaaaaaaaaagtcttgttttctaggtgcaattagggaaaacctccttcatgcagacgctgctttgtatctttatcaaatccctgaagcatcattaaaggtctgacagacatcactgcctttgctgcctcttcccacctggcaaagtgactgggaaataatacccagatgaaatgacaggctataaaaagcaagtacagatcctgcaaaaagaagcgaaattcaccaggaggacaaggttacttgatcattttaaacttgtctttaattgaaatctgcttgaacaggtttcattgtccagagaaagaaaaaaatgccctttgaaaaacacttcaactaaattctataattttgtcatctgaggaaatcaggaaaacaaagaaacatctaacacattttcctgatctaagaccatgtcagaaagtatgttgtgaagttttgataaattattttataaagtaaatttttctactaagtgttttagtagattacatattccttatcagtttttttttccccaagccagggcattgatattgtggcatctgcaataaatgggaaagatttactgctgcctaaaagcatcattgtggccagtttgaccagatgcacagctgcaacgttttgaagtgcatcggagataagcctagagaagcagtctgggaagtagttttctcctgaaaagttaggggtagacagttagttggttaagactttgaaacctataaggaaactctgttaattttttagactagttccttaaaaaaacatcaaatcttgtattgtaaaaattgtgagactactttttttgggggtggggagaggttgttgtggggagagtagtgtttgaaagggattggtccaggcagctttgtttttagagacttgtaagtggttgtttttgttgttgtttaaaaaggttgtaaccactaattaatggaaagcaaaaaaaaaaaaaaaaaaaaaaaaaagcttacaaagggattgtatttttcaactaagaaagtattgtttagtcacagaaagaactgggacgttccttttcccgtgcatgtttttgacataaactaagctgtcatggcttatatttgaaaatgacattatcatatgtgaaacatgctcttcagtggttttaggactttattctcccgtttccatttttttttctgtctcagcatattcagcacattatgcacagagctgtagccttcaaggtcatagactgttgaaggctaattgattcttctttatcctggagcctgagagagtagaagagagacaatcccagtaattgtgtctgcagcgttgctccccaaaccaatctacctactaatgttagagttttattttataaatactagaattactccctcactgactcttgtcaaattacaacattctttgtctttgttataataaaaggcaaaatatgacattttaaattgccttaaggtatagtggctatgtcgaattttctaaaatgggtatttctttcataaagtaatatttcatattttcatgatattaatctatgcattcatgtaggtcttaagaagtccaatgcagaattggaatgaaagtatataagtatatatttttattctaaagtatttctaaatatggttaatggtttcccactaccacaatgattatattgtcatgatactaattaagtttttacttctcaatgagtcacataatacttgcactattcatttgttttgtctgggctttaaaatttttcctaccctgactgttgggagattgcaaacttagattatcataaaaagagctgattaattaaattatagccaggaaacagtggtaccatcttgaaagaaaatgttttctggatatgagatcctccctgcttgacaacagattcttggatgcaagaatgtgttggtattttcatcttgggccaactttgttttgctttgtcctaagtcttattatgggattgtatgacaaaccattgttaccgcagtgacaataagaatcagtaaccatttgcaaaagatcaacatgatgagttggatataccataggatttctttccttctatttgaaagtgccgttcatttaaattctaatgcatccttcttctagttcttggtaactatgtttgtaggtatttcagaacagtgattttaaataacttctccccactttaatcatagccgattacagcctaaaatattaaaaactggaagagactgaaagatcttctattggaactgaataatttcataaatttaccaatgaagaaacccaggctcagaaatgcctattgaaattcttttattaaaatatactaaactctgaaaaatgtggcaaaatccaaagtattagaaaatgtctctgtctctgagaatttaaacacacacactctctctctctactgttttcttctatcatcgtatccttactgtagagagttggagctagagacgaatgtagcatcagactgagaattagggaagtactttaagtgggaccactgttcaggtgtgtgtttagtgcatatcactaaaattaaattttcttctcgccttcctgttttgctcttattaaattttcagtcgtggtggtcttttccctttttattagatcatccatactttgttcagcttgcttctgaaaacagcatgggttgcctagggtgagttcttccctcatatatagcagattgctctgtggctcacttcttttcttcataacccattttgttttctcctctctattcttttgtgatacccaactcagacttcttctcccctttccttcctaccttcccaattatgtattgactcttttttatttttgtaattatgtcattttggctttataggtcagtatttcattgcatcatatcaaaataatttcaactgtctttaatgaaactttattgcattttaatgctgaatggcactttcatatattacaaacatacaaaaaaaatctctagccaatgaccaatataccagtttcttaatgacataattaaatcaaatttttaccttcttcttgatcttttcctcttttttttctttagtgtgcttgattccagtttttctgtttttggacatcagcatttctgtactcccagaaaacgatgttccaaaccatacatctgtgttcttcctccttccctcttccttttaacaactcttcatagtatccttttaaagtatgaaggaagaggtattttatagattgaaaaaccaaagcataaaaagttatgacttgtttagatgcccctgagaaccaggaatataacttgtccacagagtccattgaacgttctactacagcataaactacattccgtctacttttatgctcatgtttctacttttattacttttgctctacatcaatgctttgtttttcttctattatttcctctttggtttttttttgtttgtttgtttgtttgtttgtttttcattcagtgaatgtacgctaagtgcctactctgtgccagactctgttctagaccggttatatgacagtggaaaacagtagagtgcctgccctcagggagcttatgttctagtggattttaagaatctaattgcataatgcaatttgagatatttcttgctttcttatacatataccctcttcattcagcatttcttcttctttactgtcatgttattcaccttttgacttccactcctgtcttttcttaatatgttttcttctccatctaccaaatactgaacacttgcccagcaatgtcctttaactgacagcaatcccacctctgctaccaacaggctgagtagccaggggtgattcaccatatggcactatctaatcaaaccattggagtagtgagaaaaatttgatctgtctggccctttaggagcaccctcttaagatgaaaaatatatacataattcttctagcatgtacataaagattctaagattattttcagattctagagagttggtagctgtaaatatttttgtttctatattttgctcatatttttatgtattgttttggcttgcataacatcaagagtattaaaatattcccaagggtttttcatttcactgtacggacaaagactagaatctgccattaagttgtttagttcttaaactgaataaagacatgagttcatatactattcacatgaagagtgattgactagcagtgagtgaagttaatcctcatcatctcaaagctgattgtaatctttactgcagtgaattttatcgtgtgtatgcgtgtgtgtgtgtgtgtgtgtgtagacattcaaagggtgtttctgaataatataactagtatcttataatcatagaattttatatgctgaacatttttagagattatttgtgtcacttcctaagtgagaaaaggcaggtctggaaaagtgaagtgacttgcccagtgtcactacaaccaatcagtagcagtgctgagactaaaactgaagtcatccttacctttgctacacttgcttttcttctcaaaactgtttttagcatttattcaagtagcatatgttacgttatcataatttaaaagatttggttttcccatttattatttaaatactaattagtaaaacttttatcaccctatagcagatgtcttctttagagaagagaattttggccaggtgcggtggcttacgcctgtaatcccagcattttgggaggccaaggtgggaggatcacctgaggtcaggagttccagaccagcctggccaacatggtgaaaccctgtgtctactaaaaatacaaaaattagccaggggtgggggttcatgcctataatcccagctactcgggaggctgaggaaggagaatcgcttcaacctgggaggcggaggttgcagtgagccgagatcgtgccactgcattccagccagggtgacagagtcagactctgcctcaaaaaaaaaataattttacctttataatattgatatgtataagacacccctccggaggctggacatctgtctcccaacaatataatatatgagaaaatgttttaatgatcaacgttatcccaactgaaatgcgttacatacttagaaagaaattagttccttagtgcttaaagtattcaagcagtgacactgttgagggagatttatgttcctagcagattattaactatatttacttctgaagtctcttacaactctggttctctcagtttattgtctcagggtgttagctttccagtgggtagacttgactttcaatcctacttgtccctcttcatggccttgagcaagttagaccatcatgttaaatctgtttcctcatttaaatgtgataataataataatatacatgtcttgaggctgttaggagattaaatgaggttttggaaaactccaagtcctaggcctgagacataaaaaatatgaaaccagcaccaattttgtccctcattctattttaactccctgcctcactttgttctttttctcctttgatcttgacagtggtttggtaacaatgcctggagaatacattttggggttttaggggaaccttatgaaaaactttgaaggaagtgaagagttgatgatacatcatgctaaagtaggaattatgctagaaactcgagatcaaataccagctctacctcttgcatgctgtgtgactttgaggaaatcacttcacttgagatttagttttacatccaaacaaatggggatgttaacatctaaaactctcaagagattgtgataaggacaaaagtggttactgtacctaaagaaaacagagcttaaaaatatattgaattccttctttgccctttctatcagggttcgtgtatgcatatattcacaagtgctaacatttctagaaataaattgtaggggttctttaccagtgaattaatttgttatgccttaaaatggtctgtaggactttactaatttcttgagcccagtgtcataaaaggagtattttttcccttatacaaattggttagaatacatagattattacctttgagttacatagattattactttttgagtaatgtccaaaaatcactgcatgaggggcttcattatagggaaagcgataaggagttacttttgagagaggaaaagactgcatggtatgtaaaattgtgtttgtcaagtaagtactgtttttggaaagattgggacaacggaaaacaatctatacagtttagatgtggtgcaggggaagaacttggctagaaataccatgaatcctaagattatgttcaccttactctttttattgttccaaactgggatttcctgatctcaaaagatgggaattaacgtctatgagttgttttcagcatttgacaaaaaccatggaaataatatacatcaaataattttatatgagccaaatcaaatgtagaaattctttgagtatactacatctatgtgtatctatgtgtgtatacatacatacatataattcatacatataatattctaaataaaggggaaaattatttgacaataaaatgagcagataaaaatatttttaaatttggacaaacaggttgtttattaataggtttgggaggggtggacaaaaaaacttctagccctatgcctaactgctagagtaaaagagaaaaaaaagtgttttaaaagtaaaaaataattggagcttaagtatatattggagattctgttgcaagtaacttaaaatgaaatcttactagctggattattggccagaatcctacaaaaagggaagaagccagtgctgttctagatatacacacttaagggattttggtatttttgttgtataccttatggtttttctaacagacagatataagtttgtaagagcttgccatttacaaaaatgtatagtagtgggcataatatatgtatttttatttattctttaaagtagaactagaaatatgtgagatcctttgttcatcttgattgttattcactcaagtataatacctttgctgcagaaattgaactctaaatcaatactggagcaatgaggcagccccttcgaagcataaaatatttgataacaatctagagtatgttttgcctgggtataagttttctgactgtacaatggaaataagctgatggacccaataaaacttggtgaaataaaatggaaagcttcctcaggtaaaatattttaaatttttcatcagaaacatgataggacaagacttgatttactgtgattttcagtgataggcacttagtgtttgagttgcatttcatgaggtggttgtctcccagccaaaggagaaattcatgaactctctttgaagccagagttagcacagaatttaatatgcatgtaattatcaaatgtaaaaatcttcataatttattttagtttaaaagttattaatttaaaattaaaccaaatgtacatatatgcatatgcatttggaagaaagatgagagcaacactgaagacaatgatagttgccattaggaagaaacttaattcataggcaagcagaagaccctatatcttccagttcctaactgtgttgcctgtattggtgtacaatgtaatataattttgtttcccccgtttaccttccttttccctccctttgtttctttcatacttgccattcacagttactcttctctttcctctattctttcataccccacctattccttcttctccagcgatctcagggcacatggctccacacttctctctcccaccctgctctgaagccagtgtcctaaagcatcagaggttatagagtagatggcccagacctgtggtttctcactggatggttagtgggagagagtgaatgagaccttaaccacagtcttgaccatgattagcctgatgactttcagtgttgcctcttcctttgctaagtaacaggaagtaattgttttatgaaatatgttggtgtcacagcaataaaagctccatacataaatggaatgatctaaggatagtagaattgaactcttgttagcatttgtttgtaatcccttggtagagcttcctgggtcataattgcttgctcttctgggagcaaaaggaatcagtaaccattgattgttacatgatgctaagtactgcctacaaagcaaatcttaagaatgattagtggcagagttcagggttactactctgatctctttttactataatctttaaagcaagctgaatttcacagtttttcccatcaagcaactcctatgattcttcaaaaggaagagaaaaaataatgtcatgtaatctataaaagcttcagttgacatcaaaaacaaacaaaaatatgtaaaataattacttcagtttttttaaatcttcctacttccacgataacagggagacatctaaattaacccctgaccagtaactttagtcttgcatgaatatgatccttataatcttaattgatctgaactatggaacctgtggtacacagtcaataacctacatagccgctgcctatttagtaaactatacatgtaatcagtgggatcaatacaaggattctcaaaatccttgcaaaattcattcttcaagattgctgagttttctgaatagctgatgatttgtcaccttgaaacttttttatctattttggattgaaatcttttaataacttacaatactagtgactactgtcattttaaatgggatttattgaatataggatcttcacaatgttgaatactgtgatgtctttaggacatagttgggttatgttataactttgttgacccctgttatttcgttaggacatactgagttgtattagggattctagctcttttactaaataacccagacctacgtatgttctgattgtattttgggttattacataatcaaaattagcattacagagctttaagccaccttagagacactttgaaccaaatctcttattttatcacagagagacaagcccaaagatgttaaccttcttgccagagaccacatagagccagaaaatgttgatattttcatctcttctaggctttcagctaccaggtcactttgcaaccagtgtatgttaattgaaacattttttctgcacttctgatgtatagttctggtctcctgcaggtttaaaaggcaaattttaatcaggttaaacatttgtattaaacatttatataaaggataaaatctctctgagtgagattctctccttgaggaaatgcatacattttggtgacatgttttggtgacatattttgcttatatgtcactcttgctctgttctggatcaacagagttcaaggatgagaggtgaatgacaaatgaagaggaagagtaactacttggttctgatggtccttggatttatagcgcagatttaggggagctgagtttaattcctagatgttttatttgttcacttgttcctcctttcataatatgtagaatggcagtaataaatcttttcttttcttttcttttttttttttttttgagacagagtcttgctctgttgcccaggctggagtacagtggcgtagccttggctcaccgcaacctccacctcctgggttaaaccattctcctgcctcattctcccgagtgctggggctacaggcatgcactatcatgcctggctaagtttttgttgttgtttttattagagacagggtttcaccatgttggccaggctggccttgaactcctgatctcaggtgatctgcccaccttggcctcccagtgtgctgggattatagccgtgacccaccgtggccagccagctataaatctttagaccttgatcatgcacctaattggaaattgttttttgaatgtatgagcactactaaattagtcagtgggcttcatgggatctgttttgaaatttattgtgaaaccttatgatttataaagcacaaattacttttattttcatttcttgaggacaccatagcaccaatatttacaaagcacgtatctcataaactctcttgtgatattgaagacacgcctgcagcagaaccccaaacttcctgtcttccctaactccagctgtctccccagtcttcatcccgatggaccatgttttagccaactagaactcgaccctgaatattattttttctcttccatgtttttgctcattctattttttctactataaatgtgctcttcaaacagtctctcctctcccaaattctacttaggcctcaagactcacctctccaaattagatgatgggacccctcttcttgaagacctcctccaaccccccataacctattgcttgtgctttatcacatttagatttgtgtgttcttatttggatgcttgcttattgctcatagtagactgaccatttcctaaggcccagagttatagctaactcatttttatgacctgtatagtaccaaacagtgtacaggttgagcatcccaaatatgaaaatttgaaatctgaaatgctccaaaaatccaaaactttttgagcatcaccatgatgttcaatggaaatgctcgttggaacattttagattttggattttcagtttggagatgctcagtggtaactataatgcaaacattccaaaatccaaaacacttctggccctaagccttttggataagggatactcaacctatattttatatgaagtaggtatctcattcgtatatttatggaataaaagttacactgagggtaacttgcttatgggagtggaagaggaagaaaataatctgaaaccgggtcttaaatcactgacattttaattttgaagaattcaatatagagtttagtcattacaaactttgttgagacatgcttttggacattttaacatataatttgcaaagtcggacgtgatttaaaaaattcacatcatggagtttaagagacttcaggcagcaaagaattttatttcatgatagtatggtgattaagagcacacactttggaaccagattgtctggctttaagtcccagccctgtctccggctgtgtgacagcatgcacactatgaactatctgtgccccgattttctcatctgtgaaatggtggcaataactatactttcctcaggggctttttgtgaggatcaaatgagttggtgttcataaagtgtttggaatagtctctggctcatagcgctatataagcatgagctgtcgttactaggcagttttaacaattaaagtgcatttccttagatttcaagtttgatagcttgtgattacaataacaggcttcaggaaagggccaggaattccaagggacctattgacacagctatggatgtgctactatttattttggtttggtttgttcatgtggtttttcctctgtgtgatttatgtgttaccatcatacctgcattgttctcaggatttaggagaacagaaaaggataatcatcaatctacctgtcagtcagaaatagagcgacatggatggtttgaataaaaatgctgccctctctggcaaaatgccatctgttgacattgacatggacaatcatatatgtgtatatctgaatttattgctgtaacttcttattctgtcataaaatggtggacaaattcacaaggagaaaagtaacttatcttagttgttgaagaactgttgcaaaggctttgaattctgcaatgctatcattttaccaagacagaaatctactcattatccagatgcactcaataaattaatgcgatgatgggtcctgtcattgataagataacagtgatttggaagtatctcagtgttattaaacaagatcacagaagagccattaacattttaaaaacagagagatcttgtagataacctaatcaaaatattttactttactcatggggaaactaagatccagaattgtgaaatgactgggtcttaaatacatgcagctagtaagaaacacgggctggtctaaaaaacaggaatgccacttcatttagggctttttttttttttcaatatcccatgctgcttcttataaattagataattctttaatggtggaagactttattttttctgttgttctatattctttattgagtgcctgctcaatagagaagagtttacctctaaaaggagaacaaacaaaagaataataaaccagaaatcatatactatcttagcaggcagtacatcatatggggaaaataagtgtgaggagatcagagtactggtggaggagcatagttattttaaatagattaaaaggtacaaacatacagtctgatagaagaaataacacctagtgtttgatagattagtagggtgaccatcgtttctaagagtctattgcatgtttcaaaacagttataagagaataatttgaatgtcctagcataaagaaaaaacaaatatttaagatgatgcatatcccagttatactgatttgatctttataaattatatggatgtattaaattatcacatgtacccccaaaagtgtgtacatctcttatgtatcaataagaaataaaatttcaaaaatacccttaagaaatacataaacagaatggtcaggaaaggcttctttgaaaaagtaacagctgatgaaaggcttgaatgaattaatggagttaaccatatggccatatggaagaatgttccagactctgggaaaaggccttactgcccaggcagaaggccagtgtagtcaacttaagccaatggcttaagtgtagcatgggaggcaggaggtattaaatgagatcagagaggtgatgaaggcctgatcagggaagcatgccattcattgtaagaatgatggcttttccaccgaaagagatgaggaattattgcagagttttgagtgaccatgggacttgatgccttaggttttaatgggatcactgcctgctgtgttgagaatagcttgtggagaaggatcccaagatcccggtggaaatagtcggaccactgaggagattgttgctgtaatccagatgtgtttgtaggagttgtaggagggaatgtaaagacattattggattattagattctgaatatattttgaagatagatttagaatgatgtaatgatgaattggatatgggatttgagtgagaggagtcaaggctgatttcagtctaagtagttgaaaggatacggttatcaccaactgagatggagatgatctaaagatcattttgctcagtctcccaatgcataggtgccaaataaatcaaggttcttatcaaaattagaactgtggacattaccttctcataaaaataaagcgagatatgcctgagagcctcctgtaaatcaatacggctttatgtgtgactagagatccttataaatacaaaagaaaagttgcagtgaaattgaggatgtctgcctagactactcggtaacactatccagaacccacaacacgtgatgatggaatgaagtcccagggggatgtagaataggcttccaacaaaccactttattcctattttatggtttctttttaattcatcttgttcagcattcaaacctggttcaagttgttcagtttatctaaagcatattgccccatccctctcagctcactttcagtcatcttttaaactttatttcagaagtctactcatcttagaaatgtgcactttatccctaaggtgagctaagtactttcctctctttcctctaggctttgacagtatccagtattttccacccgtttcccatgtactctgctgacatgcatgtattcctcaaggtcaagcatttcttttatccatgtacagatgcttcacatagcaccatgtatactataagctctaagactttgaagtacttgcatgtcccaggtagaggtttttctcctttctctattaagctgtcaattttctatatttatgatgaaaatacacagcaaaagtagtgtaaatgcttattttacttctcaaattactcgtcaagttgccaaggtgccaactattttttgttccacatattatatcttctctacttcactttctggaaagtaaaaagcagcaaaaaggaggttatcaagagaggagaagcaggaaaagttctagacagtctacttcatttttctcatattctagtactctagacagggtgaaggctcctgttgcagaagtgatggtcacatattcctgcaaataccaagtactcagttcagcccgtgcctgcagtctctttacatccctgtcctcctctgcttctcaaattttacctactatgcaaagtcttgatcaggttccactcttctttagagacatttcctatactctgtggtcatcattaaactttcctccttagtctctattccagcagctcgaatcatctttaatactcatgtgtgtatttaaacatccatcctaccacataggtgtttgattcagtcatgtgtgttttatattatgaattaggttttaagtctcatctttggttttatttacctcctcatacctagaaaaacagattaagcacttgttctctacaaggccctgggttcagagtagtagaattgagagagacagaaagagctagtttctgtcttccaggagcttggtttcatcaaagacataaaagccttgccattaactggagtataaggtagtatatgagatgtatgaagaaaaaatcctttagtttgaggtgaaaaaaaaaaaccaaaaaggaataaggctaagaaggaagagaatcagaggcatcttcatattgcatggatagttgaggtgggccttgagagtaacatatgattctgatgggtgtggttatttcaggtgggagtaaaggcccaagggaaacagacatgttaagtgcatggtgagtcggccagttgagtcagtatgaaggaatttgctgatagcgaacatttattaagcacgtattgtgtgttcagtgctttgcatgtattgtctaatcctcacacacacaaaaaaaacattgttcctttttggaaataaactgatggtgtagaaatgatgatgatgatgatgatgatgatgaagatggtgatgatagtgacaatctgaatggtgcagaaggaaatgggatgccatgcatgagtctaaggaagactatgaggaaggaataccactgaactaattgaatgcggagaaggaaggaaacgattccatgcacattagtaatttagcggttgttagattaatgaatctctgagtgacaacctcatacatttattcaacatgtatttattgggttctcctaagtctttatgtatttattaatgtgcaaaatcagtagatttatgacaggaagtgacttgtgctccaatttccagaaaacattcattacttcttcctgatgaagctgctcagttaaataatattaattgttcttcccctgatgttatacaaaaattaaaattgatagaatacagaacttaaaagacatttttactttactttttgacattattcattgtttgttgctgatgaatgaaacctcttttcgagtgtgtgttccctttaataggcactggtaatttatgtactaagatttatttctgtatggaaattacaagtgaaatttcatattgaatttatatttagcctgttctagtacatagtctctgcatagtatatccatggcatcctacttaatattacagattcttttatattagtgctgctacatgtgtattctcaagcttttaattgtacaattattacaaaaagaggtaaaaatatttcccctacaaaattgttgctgttaattttttcctgtttattcatggagtattcaaagaagagctgtgtgttcattacattccacaagttagtccattcagtttgttcaaaatatgaattctgatgtccagcagttaatataagattttggcaggctattaataatggcatactcaatttgtagctctttcatccatgtaattttggtgatgtatgcactatgttccagggaaaggaatagttcaagattaaagaggcaatcagtgtattggtgcttattttcagtgtgtcaaagctgctaaatgaaagggtgcaatttctacttgtacaatttccacttgtgctgctcaaaaacaagccattgatattagacgtgtatcaagcatacgtggttgcagatgtaaataattaacattaaaaacattttcttctttagttgtgtatttagaacagtgatacttagttaatatcaacagcttatttttagaatctgaattttaaaagtagtgaaaatacttctagtgattaaaacaatgtatgaaaagaaaaaaattagtaggctattttaatataattagtgagtatgctattttaacataattcaaagatgcattcctattttaattaaagctcattcagtatgcaagaattccagtttccattacttcttgctgctgctgtctgatcttgtgtttcttgagggacacttcttttatgagcaattcttttgcatttgcacccagattccttcacgtccaaagcagtagtttaaaagagaaggctacatttttccattttggcctggaacttagatttttgttctgcttacttcttctttaagtatagtgaatatataaacttgtaggcactcctttgcagacagacttcagaatcacatgttcagatgaatgtgggaatgtaggcagaaatcagaaacctgattgtgcttcaccgcttcagaccctgccctatgaggccctccttgtagaagaagaaatggaactgaaccaataactgaagtgaaaaacccttctggaaactgtatatatgaaaagattccatttagatccattgaattttgcctttcattttcaaacttgcaaatagaagcagcattttaatatttttcaagagggggaaaaaaaagagcgtggttccctggccctattgtatcacttccattttgtctggaactgatttcatgcaggagatgcactggaatcagcatgcaaattctatgtggctgttgttcagtctgtttttgattcatcgtggtaaaatatgcataccatgaaatttgctgtcttagccattgttaggcgtacagtttggtagtgtcagatgtgttcacattgttgtgagaaagagctccagactttgtcatcttgcaaacatgaaactctgtacccattgaacaacaactcctggttttccccaccctccagtccctggcaaccaccattctactttgtgtttctgtgaaacatcatataagtggaatcatgcgttatttgtctcatgtgactggcttatttcacttagcacagtgccctcaaagttcacgtgtattgcaacatgcatcagaatgtccttcatttttaagactgaataatattccattatatatacagtcatacgtcacttaatgacaaggatatgttctaagaaatacgtcattggaccatttcatcgctgtacgaacatcatagagtgacttaacacaagccttgatggtatagccaactacacacctaggctaatcgatagaatcttttgctcctaggctacaaactgtgcaagtatgttactgtactaagtagtataggcaattgtaacacaatcgtaagtatttatatatgtaaacatatctaaacagagaaaaggtacagtaaaaatacagtattataatcttatgggaccactgtcgtagatgcagtttcctgttgaccaaaatgtccttatatggcacgtgatggtatatgccatattttgtttatctcttcttgcatcagtgaacacttgggttacttccacctcttaaccggttaataatactgatatgaacatgggtataacattctaattatgttttgttcatctgtggtgggtgtgaaagttaaaccaatggaacctttttttagtgaatttagtcaaatttctgaaaaccaagaattcctatggaaacatactgataaacatacttttcttattatatattaaaaatgcttgtagggaaaacccagcttctaatagtactctgggtttgtgaagatgcagtaagtgcttgctagagagatgtttttaatctagagagctagagcagagacttagagttcacttgtttcttctctttttttcaatcatttataagatctctcatcttaactcattaaaactggctgattgactttgattactgacacacccaaactatttcaaaccagttagttcaaaaatgcagttgcctctttgaattatttataaaaaggatctcattacatttttccatagataacgatgatggcaaaggggaagaagggatcattatgccactcctttaaaatgcgggcttctggcctggcacggtgactcacacctgtaatctcagcactttgggaggccgaggcaagcggatcacctgagggcaggagttggagaccagcctggccaaaatggtggaaccccatctctgctaaagatacaaaaattagccaggtgtaatggtgggtgcctgtagtcccagctacttgagaggctgaggcaggagaatcacttgaacctgggaggtggaggttgtagtgagccgagatctcatgactgcactccagccagggcgacagagtgagactccatctcaaaaaaaaaaaaaagtgacatgctggttaaaggtccctgtccatatcccccttttgcaactatttaatccccagcaaagtcctagccaggatttcctggtaagagtttttctgctctgcgttgtcaacagactattttctccaactgagctcatggaagtaacctagtttctatcactagtgggtctcagtcagaaaaatatgagtgtaggttattgaagtgtcagggttgtggtggccctcttggctgtgtgcttactggggatgaagtacatggtggaatgaaggctcttactagggagacttctgagttactagtttcaccacacagctgtctcacccagtatcttggaactgtttcttgcttcatgtgtgtgaaaaatatagtaaatttcctggtcatattttagcataattaattataccaactattaatttaatattttgtttgatttttagtttccagggtaaaacattaattttctctttaatttccattctataagattcctattgttttcagcaaataggagtttccttctctgtaagcattgctgactcaagactatataatgttagaaatagaaaaaagataagaacatgttagtatcaatagcctttattattataatcggtatgggcctaacttctgctagcaacattaaaaatcttttcttttactctatcatttagtaacggattttcttttggttgtgtcgaatagaattgtttccttgatgttccttgatagagagtgttctctttaatataggaatacagtaaagaaagcatccacagtttgtgaggcagagtttagtgctgatgtgtacagaaactcaagtgatatttagacaactgagtccttactgggaatcacttaagccttaaaacatctctgccattatgctgcttattttacattgttctggatagatgctcattatccagttctcattcatgatgagcatgggattgataagggagctgacatgaaaattatggagaaaaaatgcaaatagcaaaagatagaataaagcatgtatacctcatgatcattttccccattgatattgatttggactcactcttgatgtatcaggtgtgttcaatctttggcaaacatttagggttttcgtttttgctgaggtccacttgaaccctggagcccaaaagaagtaaccaaaaatttctatagcttagtaaattccatgttctagaacttttaatgtggacctcagaaaaaggaaataaccaagagtgccgaaagctacatgtactttgaattgttcagcatgtataaaacccaatggctaaccgtgtctagaaagaaggagataagtaaagtaagattggagcctggcgtttggagttcagcaacttttctctgttgtgcgctgacatttaagttaatagagtgatttctggtggatttctttgaaacaagacagttcatctgagatttggttaaaaaatatttcattactttgaggaagtgattagggttggtcttatttagttggggctttcaaaattgatagttttgcctgatggtatatgctaaaacattgaattgtgagtttcctagccagactggaccctaagcccatcatttggaaatagtctttcttatttttgttattcttgtatttattaaagaacattggactagtgaaaattacaaaagaaaggaaaatgacacaatacactacattctgttgtatcccatttctatctcagggaattatgtgtgtttaccaaactgatgtctagatgaacattcaatttcgtatcttgccatttaaaatttaacatcatgtgcatttttatgtcattaaatgtccaaacacctggaatttttacgtttgatttgttattgctaaaaagtacttctcttgatttttaggggttttcacttttaattaaaacatattcttgaaactccttctcttctccttggctaaacctgttatgctacaggacttcaggataacttgagctgctttggctctttgattaagtgcagatgtatttagggtttgaggtgaaagggtttttaggacaaatcgcattccagtttgagggaaaaagagagagaggaagttttggaagttacaaattcattaaatttttgcttccacatggaatccacaacttttccttttccctggctgcctttctcttcttcattgagttttccaggcctctcttccttctgcacaggctccaaagagaatggctgactataagggttattagtgatattttgggagttattccgttcttatccactctcccaccaacacacacactctcacacctcctcccatcaaagcttgggatctctgggaacagggaaacatatcaagatattagaagacgtcaatgttatatatgcagaaatggtgaaaaatcaatgaatttagtaagttaaatttgtttgggtagcattttaaaaatatttaagtactttgacatatgttaccccctaatacacagagggtgctcagacagcatttgctacaggagtgaaccctggccaaagctgttttaaccaagggacagtggaggcccagagaggttcgttggtttgcttaaaatcacacatccatgggtaagcaaggtgatggataatcagctcaattgagtcagtttacattgtatacacataacaaagcatcatgttgtgccctgtaaatgtatagaattatgatttgtcagttaaaaataatattaataaagtaaataaaatcacacatctcacattgagaggagggcagcctagacccagatttctgttagccccaggaattgaggcatatatgggagactagcagacaacacacataggaaacttttgccacttaattattattctttttctcaagaccactatattcatttgggtttgttcttatgcttttttttttttttagcaaattaaaaaaaaattatccttgaatgattctaggttagctttttgactaatggatgttggaaggagctcagtgacaaaggccagggattattttgcttttcctcacctcttcctttgttcctcctcatcatattacaaccttctgcttcaggattccttctgctttttagcaggattgacatgctgggccttacccggaaaggcaaaggctgatttgattagggaggtctttgttccaggtatctcacatcagagagccttcataacaaatgagaggaatggattagaagtttcctggggataattttttgtctaccctttaagggaaatcttgccttcattaattacatctcaaatggaatatgtggaatatagacattttcataatcaacaaggtgattttcattttaaaatgcttaaaaaatgttaagcagcatgtatgcacgcacacacatgcaaccaatttcttccacctttttcttgttttaattcttaaaatatgaatttttaaatataaggaaaatcctaaaagcagaaactaataaatactaataaaatgttaattacattgattaaatcattagtattttaagatgggcccctgaaatgtctccataaataagcttaatgtgctttcatttaaacaacaattcagttagtaaattcaataaaaagcaaactaatgtgacataaacatatttatgtgattagaaaatcattatatccactttaagtgaaaagaaaaagtcttcatttttgtgttacttttccaaacctccttttggcactgaattgtactttatgggggtgtcttgtcatttttttctaaattaactacacctctgcttgcctggaaactagagccattctgacttctattccgatatgtgtttttcatctcctactttttttttttttgagacagtcttgctctgtcgcccaggctggagtgcagtggcacaatctcggctcactgcaacctccacctcccgggttccagcgattctcctgcctcagcctcccaagtagctgggactacaggcacgtgccaccacgccccactaatttttgtattttttaatagagatggggtttcaccatattggccaggctggtctcgaactcctgaccttgtgatccaccctccttggcctcccaaagtgctgggattacaggtgtgagccaccatgcctggccttcatcttctactttttttatttttaaatattttttattcactattgctgacatcactctcctacctactcggtattctttcattatgagaatctcccacatgaaaaatagtggcacctctggaactcccaaattctagtttagacagattaatccacatttatgttactatttataacagcacaactctgtaaataaatccaaatgtccatgatttattggttacatgttatgatattctgtagaatggatattattgtagccaaaaaattaatttacataggtacacagatgatgacatggtaagctttctttaattagaaaatgtttctttcatttaatatctttcatcttaagatcaaaaacaatcttgcaatattgaccttacagcactgttcttctgttatcctcattaaaataatatcaataacaatatagtaataatggccattgttgttgttatgttctctgaggcatttagctcagagaatgttgagaaaaaaacctgacaaagtacttaaatattcttgatgccatctctctcactcttcataggttgtggatataaagaactctgtttttttcattttttataagccacaaacaatgaagtaatcatttctttgttaaaacaagaatgtgcagattattctcactgaaaagttaaaattgagttgtatttaagaataagcatctagtcttgaccatagtgtttatgcctataattaaaacaaaccaaagccaaaaacatatctttcaaatggtttggtgtcacaccacaaagcgagttattttaaagccattggaggattctagcaactgagcaaataccgctgatctagtcaatatcaattgataatgtattatatgaaggaaagtaaaatctctttcaaaactttatacatgtttcaattcagttaattatgtaataatagaaatggcactatcatataagagggtagatgatataatttatagatcattttatcacttaaagcacctctaagtgtagaaatagaatcatagaacctcatattcaaaagcctttctgtttatctatagtggaatcgattaaatcatatttgtgtaataaatgacagtcataacaaatacagtaattaaaatacagttgttttacaaatcactgtcttccactctttccacttccagcattttcttttgatgggttagaagattaaatagcaagttgtaattttaagttatggctctttgacagtggaaaatggattaaaaaaacacacaacaacctactaagtcttgtagtttcttccatgtggtcttttcttatctagagatagtaagtcaggcatctacaggaaaagaatccactctagtgaattcgtgcctgcctttgaactgtgaaaatcctttgcattgccccacatttctaaagacccatgaattgtgcggtcagctagaaatatcctgtttcaaaattgagattacgtgacactgccctagaatgacacttgagctgaatgctcttgtccactgctgtagggtacacatgaaaccttttacttagaaatttaaggttcttcatgtggctggaaaaatgccacaacatgacttttatcaggctaaaatttactgtgtcatgacgaaaattgaataaagtaatcttgactcattttaatttatttcacctatgtctgactccagctttatcctaatatacaggacaaaagttatttccataggagcatctattatttgcctctatttctaaccctgtacaggtatgttagaaacactgaacataattttatatatgtctttgtctcatcaatacagtgcagttttattttttaactgaagaattcgtgttttgacatataaggggttaccagagctatccaattttattttatgaaacaaaattgtaattattcaaagtccaagacatgaacagaaaataaaaagtaatgtttaattcatgtaagaaagcataactgaagctcattagtcaaactaaaaagctcatgaaatttctcacctgaatctttcctcaccctgggcagagacttcctttcaatttgtgctcaattttaggcaacatttaaggatctgaataggcaaagagtgagagcaatgattgtaaatgtgttgttttaaaaggtttctccactaaattcgtatatgacaactgaaaaaaaccttgggacaatgtcattcagaccacaggaaagtgcttgaatatgttctctgatgctctttttagagcagctgatataaaaagcaaagaattttatgtccaaaagacttaggcaaaatatccgaacggaatgctgaatgcatggcttttcaatttatcacagtttatagacactttacatctatagtagtaatttaatttaatttcttagaattatggaaagaacaaatggtatcatttagtataaatggttctctgctcccctcacctccggagttttaaagatggtaaaactaggactcagagatgtgaagtggctcacccttgatcacacaaggagacagtgatatattttggttgagcccaagtctccttctgaatctagagctatagctgttaaactaaggtacttctcaatcatatccatggagcaaggatgtgagagtagttggcttttgtattatatgggataccactgcaaaaaagtaagcatgacagtttcaccttaggggtgaatttcatgctttgcaccagttcaatacaatgatgagagaatggctctcatggtactgaattggacactgtacaaattcatggtgttattcatattactggccataaaaagagcaagatcacatttatatatgttctggtgaaaattactctccagtgtttctgctgtcacctacccaaaccaagctgtatatttttttcttgagaattttgcatccatactgtttcttgtttggtttgcactgacgaagaacattcttcctccacagcacagatctagttatttgcaaaagatatttttaaaattataagcaaatgttgatttagactccttacacattaattaagagaagcacttttgtggatgttctttggcttagttcaagactttgtcaatctgacttttcattaagactttatttattattttccccaaaaagtacttgttgctcagatttgaataagagtagtttacttgtctacagataaaaacaccttggctgtattcaaagagtaaaatatttaattcaaattttaggctatctgaattttatcctttctgcttagaaatgataaacaaatatttattcttttattgagcaacagctatattccagaactgttttaaatgcttgagattggggaatagagataagtgatactagcttggtatgcacgtatatgggtgaccagggggattgttaggaagaggaagaaagagaactattacaaacacgcatttataaggcagcttttaatcatcaataaaatatggtaaaatatgttagtttattaattatttgattaaacacatacttttttgtatgtgaaatactcaagttaatttgtcttgtttatttggccttgcttgaatttactaagtaaacagaaatttctagccattctcaattcaaatgaccacaaattgagagaatcaggaacacttagatacttagccaacacttttcactaacttatttaggatatatgcctgagatcatgacaataataataatcatggtaaaagtagcaattattgttattttaatagtcataacagatgagtgttgccatggagtcagtatcacaacacagccaagtccatctgcctcattttgatgttttagtggccacctaactgataccgtctggtgacactcaggtcagtgactcccgctttttctaagggatggcctcagtggtttggggaaggtgccaaggaaagctaactggggacttgctcctgataagtcagtgatcatggaccacaacaggtggccatgaccccaggggggctttgcacacttggaaaggtggagttgtgcaacattttgctgtctggctgccaccttcagtggcagatctattgccacttgggttgtctttctcataattatgttccgtatttctcaatatgacagaagtttgttaacctagttttagttctaactctgccatttactgctcatgtgacccttggcaatctgtttaaattttagcattttcatgtttttcccacctataaaattaatatacttttctcaggttagctgtgaaggttaaatgagatgatatatgtgaataggattttgtaaactttaacaacggctgacacttactcaatattggctatggttttatcagataggcatggattgagttatgcagcttctctgttctcaccttgtccttggtgcctggggaatgtctagtattcgtagtcagtgcagtcatcccagttcctgcaacgtggtactgataggaggaacaacaatcaacatttaagttttgtctaacttgcctaagtttcttccatttacagtaagtgatgagaaatggggtataagtgtgagatttatgtcactattcaagtggggatggttaagtcaattaatattaagtaatattatttaaattaattattgtctccttgactctaatgtaggaatacattatataaaaagtaaagattttgtcatctcatcatccacagtgttttgcatgtgctaggttcttagaaaatacttttttaatgattggcttttgtgtttacctcaagagtatagagagagactgaaaaatatgtaaaattatgataatcctgaagtttaaggttcatgaatcaaattttcctcttcaaacaggtgaataattttgaaatttattagtaaatatttaagttgactctttcccaaatactgcctaacttcttttcttctataattaagtcagataattttaggaaattggacaatttagtcatctttctatagcatgtacactacagatgactattaaattatgattccttcagaatctttattttacaagaatataattaagcttggctcagtggctcatgcctgtaatcccagcactttgggaagctgagcggggtggatcacttgagctcaggagtttgagaccagcctgagcaacatggggagatcctgtctctacaaaatatacaaaaaattagccaggcatggtggcacattcctgtagtcccagctacttgggaggctgagataggagaatcacttgaacctgggagacgaggttgcactgagctgagatcatgccactgcactccagcctgggtgacagagccagaccctgtctcaaaaaaaaagaaaaaaattattcaatcatttatattttctggaattttttctaaaatttctcccagatactttaaaaatactcctgcaaacaatttccacttgcctagcaggccattcagaccacagaactaaaagcaaaatttatcagcctttccttccaatttgccatacccccacaaatcgcacttataaagtcaagagtaagcacatttctaacaaggaccaaaacttttttctcaccaatgacactttcctatatcaagtgtacctaatcaggcctatcattaagaaacacaacctttgctgtcctctgctatatcacatcatcttttcaattcagattctatttacaaaaatcctctaaactcattggtttttctacaatggtttttgatcacattatattactgacaaatgctatttttatctcctatatgggtgaatcatgcatattaactctttcctgggatgatggacataaaaaatctcctttagagatttaattacatttaaattattttcaagtcaagtagagtataaattcacattttacaacagcccatcatagaagtctcactggatttgttttctttccgctaatgtcccaggtcacctatctgaaataagctacttaaaaaggacagggtggggagatggcagagaactgtgctgcaggtttgggaagcaaagaaacaaataataatgtaaatgtcatctgtgatctaagattgctatcagtatcagatattttggcttttggtcctctagcctacctaacatagacttttttttttctattcaaaaaaatattacacttgtaggaaatgactagtgttgactttctcactctgagtccaattacgggttctttaaactgctcatcgctagtattatatgatggtcagctttaatgagtgctcagaagcactctcattatatacaaggcttttgaaataagctcctgtctcgatcaattgcttcaccttcttcagagcaattagcataagaataaaggaggttaaattggacttccgggctttggtgaaattaattaataccacttcaccggtaaggacaataagtagataaccattttcattactttatgtgaaagacagattatcacatgcacagcacccagactagtacaaaagtaacccatgctgaatgtgctatcttttaagtccatgtattatgaaagatttttttcctgtaattttaatagctcaaaaaaagttttaatttattggtgacgagctgggtaaaggttggccattacatactggcaactgcttgggtaggatgtaagttgaaaaatataagaaaaagaatggcattaaaaaaaaagtagcctgactgggtgctgtgcacttgtagttccagctactcactaggaggctgaggtgggaggatcgcttgagtccaggagttcgagtccagcctggaaaatatagcaagacatcaccccaaaataaaataaaaggaaaaaggaaatatctgtactcagatataataagctatctattctagacaaatgactgattagtattttcatgctcattcttgtacataaaaggtaaagtgtcctataaccatcatattttttggaattccagagcataatgccagcgatttaactgtatggatagtagttaaatccttaacaatatatagtacatgttcattttctaaatagtagttttaatgttataaatgaaatgcagcttttgcaaattgaaaatcatgataatagaagtctgtaccctccctttatggcccattaactatctttgcatcataatatagttatctttctcaaaaaaattaagcatttagctctctcaaagatgctgtcacttttttaccctaatacgtaacaaagttgaatggactcctttcctccactgttgtataaatttaatctacattacaagataccacactactattcaagatctatttgagtgtttaggcatttcttaccaaaataatctgatacctactttttaaagaagtcaactggtcatgtcagtgaaaatggcttaattttggcatatagttagtaaaggctaaattgcaagtccaatctatttttctgatcttatgtgttcacctgaaagcaaaataatgagttcagatattcttgcatggaaacatactcattgtgatcagaatgaaggaagttattgctaatgcacttacaaatatgtttatccctgcgagctaatgtgtctcaattcctgaaagtcattattaccttgctcctttctagtattttaaaagatgaaaaagtgataaatttcaaaataataaaacatcattatttttgacattgaggatgtcattttgtaaattaacctatgacatttttactttttggttaatccttcagatttactcttcattgcttttaactatgaattaaagtaatgagttgaattaggtaaatgtctaacataattaccatgtcctcagtaaaagatgattgttaatgtgtctgatgatggctggttgactagaaattatcttcagttccacattttcaaaatgaatgcaccgtgggtggaatggaaaataataatttaaggcacattaaccattaatatagatctagggtgaccaattgcccctgtttgcccaggacagggaactttgggttttaaaactgataccaaggggtacctgggatgctgaatgttcagtgctaaaaccaggaaagtccaggcaagtgctgagtggatcaggctacatagattactgcacaattaattatagtaaattgattctgtatgcaacttaaataaacccagtttattgaggcatgatccagtttgcccgtgtgagaacctgatttctgtgaacatggagatttagccataggtggctgaaggagagacataatatagatgatgatgttaatgatagcaatggtaaccatttattgatgacaggactggacttttttaagacttagccaaagataacattctctgaaatctttcttgatatccttaccctacccagaattttctgattcttcctttttactcccaatgtaacctgtgccgaagtttattataatgcccttaaacttccttatttgtttatttgtcttcctctgctagaatataagcttctttaggaggatagaggcattatgttatttatctttgtaccccaagcatccagtatatttagtgaatgaatgaatgacctaggtatttttttttactcttcaaagtaatacaataaaatacatgataccatcctgttttactgatgagaaacaagtatctaagatgttctgtaacaagcataagaatacgttaataaattatgaagccaaagatggaaaatcagatctgtctgattgcaaagccagttctctttccattactctgtattaaataatgctggccaaacatagtgacttggaggaccctctcctttcagtaagagagtaggaatcagatatacaaatgaagactatgtcagtcttattatggatactgatgaaagttttctggtaatctgcaaaatagattttatagataattgctgtggaaaagaagtgactaaatgtaaaatataatctctgctggtatgtttagaccaggaaatcaaaatgcatgacctagtcagacaaagcaaaaggttctttacgtgttcttcttgtatcatcagtgagcctttttcatttaagtacaatgaagtgtctctgccttaagaaattcttcagaggcagaaattcattattctttattaactcactgtgcccttctccttcttctgcaccttttcctgtgtattgtctcccattttaaaatgtattaactgagaactaaagatagcaaagtgttgtcaatattataaagtatagtaagacagcatagaactacatggagaatatattgataacagcatcttttacacagtgatgaattaataattaaaccaaacaaaaccaaacaacaaaacagttttacagctacttgggaaatatctgtaaacaaagtttcataataattaactcttggaatatcgtcacttgtacaaatgctgcaattctagcaagtttgggacacttacaggaaactgtctgcaaataaacatgtataatgattttagtgtatatgacatgaaacagacggcgacccatttattaaggtccattacacagatataggagggactttaaaggcatcacaaaatacttgccaggaagtaaatgttgactatttccaaatctcagtgcaaaatgagatagataacgttaacatgcacatggagtaatacattctttaagtacctattcagtgaggacctgctatgtgcaaggcacgtattccagatatatattaatgaaaattgtgatcagttaaaaataaatgttactattttcattgatctcattttctattttcaataaatcaattacaggtaaaatgtgttatgagtgacaaaatgactggaaagtttttgccttaatcaaaatttgtgtaattattttttgtaggtaatcaggtgatttagaagcttaggaaattatgatgctatttttatagttattatgctattattatgatgaatcacccattcatgtgcattaagcagcattgattaatatttagattttcagcgttttaagtgtctgtaccttatttacatattattaaaaagtcaccttggttgtaatcatctgtcttcccatgatcacaatacaggtttgtggttttcaatatgtcatgactaagaagagattttatggtgcttaaatatgtagtaaattcattaaaccttagtcatgagtaaaatgatccctgtaataccactagttgcataatacctgcttctgatgcctgcttttaatttttctaaatacattggctggtttctagaagataaatgtaatattctacagagctatagactgttttgccacttggaatatctcgaacagttgtcatgggcaaggccgcaggtgctatatcccaagtgtatactgcttttatttttacatgtacaaaatattagaataataaatatatggtaaggcttctagaaatgaaaactgttgtcaatctgtaatttatagaaaatttatgtaagaaaacttatgttgtcttttaagcaattctcctgcataataacttagtttagagtaagaaatatgcatcttatctaaactgatttatagaccacatgctatttttacaaatatttaagaaaattcctagataaactttggaaccaaaaacaatgtagcctaataacaatgtcaactatacttacagtataattttatatataaccttttatctttataataataaatactatcacagccatttagagaaggcaattttagtttacctctattgcttaaaggctttagctattatttatgcacaacaagaattctgactttttaaaattagttttaaaattttggatcagctttataaagaaacacattgttgttaagtgcagacaaatgagaaccttgccatttctgcatttatgaccagaagccaacagagtcaattttcatgtttatttattctttgctttagaatgttatgtcagttgacagtattcagggcttgtgttgatgtaaattgccataaagcaaggaaacacgggctatagtactgtcagggaggctcagcactgcagaacaacacaatttaagaaaagcatttgcagaaagattcagtgtcagtcttcggaaattgactgtagatgcaaattggcatcaactacttcacaatctccctctaacaaaagagatggaaagggtggaatcaccaaacagagtgcacttttcggcatagtagctttcatgaagacaaaaataggatcccatttgttcattcacaatggatattcagactccacattctgccacccccatgttttattggagcctgcaattctgccaggagaagggttgcctcatgctaattcatcctaatgtttctcctccttcctacataggggaagtcttccaacccttcctactttttaagattagaagaaaagattcctcttaagccaaccatctctttggttacctttctgtaatgcctttatactgatgaaatgctgttatgttttacctaagttcggatattgtcattgtctcctgctgactcaacatgcattgtagccaggatcctggtctaaattcctgttatacaaaaccctgagctcttctaatttgcttcttgaaaaaaaaaaaaaaaaagaaaatctggccaggcacagtgggtcatgcctgtgatgccagcactctgggaggctgagatgggtggatcacttgaggccaggagttcaaaaccagcctggccaacatggtgaaaccccaccgctactataaatacaaaaaaactagccaggtatattggtgcacgtctgtgatcccagctactccgggaggcggaggttgcagtgagcagagatcatgacactgcactccagcctgaacaatacagcgagactttatctcaaagaaaaaaatagtcagctctagaattcttagggcatagaggcaatgttaacaaatcagaaggtacattaccattttaaaaaattttgtcaggcttatactcagatctctttaaacattacctacatttaaagaattattgtatgtaagagataaacacacaggaaaaaatatttgatttttgcttttgacctgtgtcattaaaataagatgattctccttatttctcaagaggcattccaattttaaatagagtggtagggaaaaaagtgattttagcagggatttacctgttcgtttgtactggtaagttatttttgtgttgataaattatttacactttaatggaattgaggtgtcatcatcttccatttatattattttgccttcctttttcacaaattttttactattaagaaagctacaagaggtgttatttgaggaaacagtcctataatatcattctttttttaaaattgacagtttcctcaaatatttatgggggaacctttctacttctcaaatttgaacagacaactttagtcaatgcttagcattgattttttgacaactcatgtccatttcaacattttattgtgagatagctaggaaattagttgtaagagcagaaaggtaattaggtaggtggtataaaatttttgacagttttgacactactgatattttcaggaaaaaaaacgcatacatatcctagtttagagtaagtctagctgaaaatttaaatatatttttaactgaacataatttttgagtttgagataattttagatatacatatagttgtaggaaataatacagagagaacccctgtaccctttgtccattttccccaatggtaacattctgcaaaaccatggaacagtatcacaagcaagatattgaccttgattcagtcaacatacggaatattttcatcagcgcaggaatgtgactattaaaaaaaatttaaatttttgaggattattctacctccaaattctttagtactaaatattcttacatctagacaaactaaaataggatttataggaaaaatgatttgactagagagtcaatatgcctgaattcatatctcagctctgccaccatcactggtttaattacatttggggagtcacagcgtggtggggcctcaatttattcttttggagggacttagtctaaatcagtgattgtcaactagaatgaaagtgagggaactcctcccttggagacttgtcagaatcttggaggagacgttttgcagacaaagcccaactcttttccctccacactcctacctccaccaccatcacaagcaaattctgatgtttgttcctagacttctaagattttgactccctcatcttccattgaggattgcttatggaaacaacgtaatagattcctagcaaatcttcatgtatagtgtgtcagcaactagtctcaagtgtctaacgttcttttcaactttaaaataataataagaaaaaatatctaccaagaacactaaaaatctttgtgcttcacaccatctagctgatgacgcataagagtagaggaaaatgtggtcaatacatgagccaaattcagagtggtgcatgcagaaggcttcctccaacagggatttgagagaaaggagatctgaggaaatccagttccactagggaatgatcccacagaaatggaatcttccagcttgagaacctgaagaaagtgactcacactacatgagaatttgaccctatctgatgctactttcaaacatatttgagtatttatagtttctaatttttggaatacgtagctttctctataattttgataccctatctccagaaaagatttattataaagttagagcacaaagaaagaaagatacagttgtgtttttatcattacaattgctgccttaagcatttctttctgtggtctagtctaagttattaaacctcattagttttttacttctggttagtgctgtctccttgattgtggcaaatgcaagttaccaatatgactctttgctacttctttccataagaagacaaaatatatggcaaaaagagaaaaaaactctaggattccaaattataagcactactcatattgaaagttagaaaaagaaaatgagcctgaactgaaaatcaaacaaaaagacgagaaaaggaaatggaaataaagtttccctgtatcccattagggttgatacattaaagaaagagtgaggatagctggaaataatattttccttcaaatgacagctaaatgagatctttggagctgtgccacaatgagtgaagtcagggagacagggccggtagtgacaggaggagaaaagtgcttcttcatgtgtcagccctgggtttaaaataactcagaaggtataaaagaaattccctcctcagatacaagattatttgtgggacacctgattaccatttaagagatatcaacagttaaaggaaggtgatttaaatctggatagctcccttttaaatccagccctctgattctataaggcaaatgacaaggctgtctagacatggagtacattgagcaaggtttagatgagggagccccggagactgtgagacagacctgttctgtgcctgagaatgtcagtgatgactcacaggaggtggagaaaagtgtgctcaatgtatgggccaggctcagggagctccttgaagacagatcatttggtattaatgatacagcgataccacaaagcacaggaggtgtagcctgctagcattgaagttaggaactgatttgaattaacccagtgtttgaatctggatgcaagagcctgtatggtatcttgcatgctaacttcttcataatcttgttcctgaatgggtgccagattgaggagtctttgggatagttgatatttcttttaaaaagcctgatctatataaagctgtatcaaccacgtgcaaccactttagcataccactctatattaatagaatagaaaagataattagcagagaaaaagagccaaggaaagctaccaagaattagtgaaatataaaatgtgttcttattatcccttcctcaataaaggggcaaacaaggttgttctggtatcatctgtgggaattttacacaaactattttaggaggaaggtgggtgactagatgatggatggatggatagctgatggatggatggtggctgaagtgggtatgtgcattgaaagaaactgcaacagagcactatcttctgaagtcacttgaagttatcccaaaggtcaggggaagaaaagggaaaaccagaaaccacatatgaaattagcaaagctgagcccgagtctgaacgcactgtgaggaggaagcaccattagggaggtgatccattgccagtggaaagccagaagctcagaaccattagctgagaccgtgctcctcccaggcagggaccctctagttgcctggggagatgatctgaattcacataggaatggtcgttgcctcttccatgaggatcatgagaacatcactaggtccaaaccacaagctgttcttgtaaaagatagagtaaatggttacatcaaatataatcataactgtagtcaacctgcagctcagagatatgtaagagtacaagtaaagctctttatccacgtgctgaacatttttattaaaatgtgtgaatgaaaaactattttaaaaaatagaccaggcatgatggctgatgcctataatcccagcattttcagaggccaaggtgggaagactgcttgagatcaggagttcaaatccacccccatgagctagtcacctcccaccaggtcccacctccaacaatggggattacaattcaacatgagatttgggtatggacaaatatccaaactatatcaggtggttactgtagagaaggggagaaatgaactcccttaacgttccagctagatcttacagaagaaaataggaattagttttgatggtatacagaaaggaaaaccatgtgaaaacaaggcataaggctaccaatatgtttaatgagaataaaaggaagaaagaataagtgactaacatacgtacgaaacatgcagctcttagatccatgttccttcagtgctctttatacttttcatggcttttcccacgtaagccgctcaactcacctaaacttctgtgccccataaccagtttccattaattgacattataaccatctttcaaagcatggagcagatacggccctttttcccagctacgaggatttgtcaaaagcagctttttaaaatggttatcttcgaatgtgcctaatttttcttatcacactgtaaactttttaagtcaaaaatcttatgatcaaatcatcattaccatttattacttttcatcttcacctgtctgcctcccctctgctcaaccccagcccctcatgcagtacgtgcacaataaatatttgttgaattatgaatgaatacctaatattgacatgcaaggagtttcatgcctcagttaaaactcccagaaaatctttttccagtccccagttagagccagtgtaataacagtgactttttttcaacaattacttaaataacattattaaagcaattgttgctttaggttgttcattaataaaaataaatgtatattttctttactgttagaacagtttgattctgtatgaattcctattcctgattttattatactcctgaaaccacagcttgctgctggttcatctattaggcatttgaaatgttgaattactttgaattgcatttgttcttatattgcctaggctctggttggcctcctagggtcgtcacaccataatcttaaacacaacatgtgccttgtggcccagatgttttccaagagggagtgctgcagccaagaaaagcaagatagtatcttgaatacccaaaggggttgatatgactaaaaagcaaccgtacagccaactgtagagctgtccaagaaaaagtgagcctattatttgtatagtttaggtttttgtgatcaaatagtaaaatttgcaaaagtttcatgataagatcttttgcttcacagattctcgtaatatctgcttttgtagtgtggactccagtgttcagcagtttgtagataaaactgggatcgtggcaacaataagagaaatcaaaaaaaaaaaaaggaagagttcatggactcttgtttcttcataaatgtgacatgataaaaattacctttctttcttaatatttgaaaataacataaagaatgaacaaagattgcttctagaactaaacttggattgaggcaacttaataaacggctgtttgttgttgtttctgttcttttcttctgacaatatttaccttttatattcttgtggagagctgagatacctgcaattgtgcttttaaaaaattgttctgtcttcttgcagtgaggtctcttttttggcttacttattaacaaagaagcaaattacatatatacatatactttatgtaacatgtatacacatatgtatatgtaacaatgtaatgctatgtgtatacatatatgtatgtgtaatatacatatacatatttatacatatgaaatataaatatctatatttttatttcatttacctactagctgattcacatcgttttcataaccaaaatatagctcatggcttgagtatgaaaccctgacaaagtatggaatttcacatacatgtcatgataatgtcctagtcagattcagtcctacctcttgcttctgaaaatgtgctagcttctgttctaatcctaattgcatgaattagttcattgtccagtttagaagagaggaacgagtaggaagctgctttggttctggggtcaatctaggacttcaggtctattttagggaaagcattctagaatgtccttgcccttcctgatacactttgatataccttcaactttgagatcattgacttagtgttatcttgaatgagggggtccaatagagccagctactccatgctgatttagatctcaatgcttttgaaattcaagtttttaaagcacttgactctctgttttctccaaatgaaatcctattttgtatttaaaacagtaagaccagatttccccttttgaagtaattataggatcccaagaacccttaattccactggtcccatggtctacttatccccccgccccccacagcaagtcccttacccctgaggcagcttcagcgactcctccactcacccagcactgtaggaaaatgtctgctgtgctccagccagagcagacctactgtattgcaaatttatcgtggctggaccatcctccagagatgtatgccataaggacaatggaggcctcagctaagtacctcctgctgcattcattcccagggtagtaggtggtatagctgcaagacacggaacccagtattaggccttgctccattttctctaggcttcaaagctctgagccagtgatagtttataaaagcccaggactccaaagaattaaaatcagcacctgtagatctcctggtgaagataaactccatgggcatgtaaagaaagcaataaagatacacacatagtttttttttttcttttgaatatcaacagtaaccttgagcagagtgactctttatcagggctcttggtacttaggctgagctggtgatcacaaaggaaagaattagaaatttaaggtgattttattttattttatatttttagtaggagtatctggctgctatctaaggaatctcttctattagttacatggaaacttggagattttattgtttccctctcagtgtgtgtgtgtgtgtgtgtgtgtgtgtgtgtgtgtgtgtgttagccatttattaatcctaactcccccaagaaaagacaatctataaatttcattttcactcacattaaaaggtgagatgcaggctgggtgctgtggatcacacctgtaaacctagcactttgtgttgacttagtgttatcttgaatgagggtggacagatcatgaggtcaggagttcgagaccagcctggccaaatggtgaaaccctgtctctagtgaaaatacaaaaaattagctggacatggtggcgggcgcctgtgatcccagctacttgggaggcaggagaatctcttgaaccaggaatgggaggttgcagtgagccgagattctgccactgcactccagcctgggcaacagtgccagactccgtctcaaaaaacaaaacaaacaaacaaaaataggtgagatgccaattctcttcctgactctgcactccagtgcagtgctccatttcccctattgataataccaccccaaacatacctatttttccaggaccacatttcttcaaattgcactagtcatgctgttaagaaacacagaatctaaaaatgatctgagaaaaagagaattgcaattacaaccacaaaattttctatatactagtgaatggataaagatatttattgtgacacattgagcaatttttttgaaagttcatgtactcttgctcaactgattgaaactttgggaaaatgtaactttttgagttgtaagatcatgtaaaagttaaatgaaggaagaacagcaaagaagttatgggaattgttgttgtgattaagtagttaaatttgtatatttttttcctgctgattagggagttgttactgaaatacgttagcaggatccttcttttagcttttcacatgaatatttgggttgctttctgccttgataattaaaagagaattgtgtatatcttgttttccctaaagaaaggtgatactgactttatcatgtcatcataatcttcacagctagtagtgaaatacctttattgaacatccaccatatatataagactgttctaatctaaactcaataaacctttaaggtctatttcttattcttcttactttatttccataacttaattagccttcaaagcccaattctaatatgcataatgacttgaagtattttccaaatacaatcagtgatttttttgtgtgtgctaagtgttctcaggacagggtcaaaactacctattacatacattcaccatgagaatttagcacagttggcctctggcaacagactcaaagatttattctgtgtagctattttctagcctgctggattccagccagttgcctaatggatcatgagtgagtcagtttcattcagtctcttagcaaagtcaatttgtccagcagcacacaattttctgtcatgtagggtctttgcctggcattgctgtgacaaacacaatctaactgttttgcttccctagattccaactgagctttggccctggaaggctggcttagataatcaaagtcccctctaaggagggaaagatggtataatgaaggcttcctggaaaaattagaccctacaatttacccatctccaaaagtgggtcatggaacaaaaatatccatgtattaagttagattaatatttgtgtgtgcaatgaacaacagcatttgccttttgattacttcgggcccaaatgagctttctcttttaagtagcagaaaaataacaaaagcagagtacacctggaagggacagaatagtcacaggccagtgttgtaagagtcagtgtggcacttctgaaggaaatctgccgagtgcatgggatactagagcaccatgatgggcaggaggagaaacaccctctttctctaccttccttctctaccgccactccttcgagatggccaagtatggaatttctctgtcaggggtcctgccacctgacatgtgcaggtccagttaggtagttgaaaaggacacattactacacttatcagggttctcactacaaacaaattttcatagtccttctggaaataagccacatcaccgaatgcctttccggtagctgacatgattgattgtggacaacgaagaagtcacttattcctaaggaagagactggagtgagggttgctgtttgcacatacataaaatcctagaagagataccaaagctacattatgcagaaagattattattttagccagtggctctgaggacaacctcatttgtcttctctatgggtcactctttttttttttttttttcttttgagacagagtctcgctctgtcacccaggctggagtgcagtggcacaatctcggcgcactgcaacctccgccttctgggttcacgccattctcctgcgtcagcctcccaagtagctgggactacaggtgcctgccaccacactggctaattttttctatttttagtacagatgaggtttcacatgttagccaggatggtcttgatctcctgaccttgtgatccgcccacctcggcctcccaaagtgctgggattacaggcgtgagccaccacacccggccaggtcactcattttttaagtgaatattttcatttccaaaaaaaaaaaaaaaagcctcatgtttccaaagtggcataaaaggccctggcatgtagagtgtagaacagaggctcctcctttttagccagtctctatttcagaaatcattagatagaacatacttggtctgaaaaaaaactatgaaattttgatcccccttggagaaaatgtactttaatgtgtatattagttttcatttccttcctctgatacagtaaagtcaaaattttgcgaaccattgtgaaataaggagatatgaccccataaacacaaacaattttcgttcccttgttcctacatatgtttgttaggagtacataaaagacaagttagctctatagaccctctaattttgagaaagagaagcacagcattttcctctttgattctgttttgaaagagtgcacataatgatgcatacctcatgcttgtctgccttcccctggactttaatttcttcctgtccagccaaaggagaaggtttttggcttggtttcagctgtgcttccatagctgctacacatcaaacctatcctaccaggtagagactagtgtattcttttcactgagggtagatggtcttctaactttaatcttccattctgcctgtcacgtctagaatctatctggttaaaactcacgttttaaaaatgcatgtcctaaattgtatccaacacttgttagtatcaattattatcataatttaaagcctagattgcagatgttcatcgtaatactttgccaatattcttatgactgtttcttttttcccatagataagtgttccaatttaagtgtgttttcctttccagaatgttctgtatgtaactcttctgacatttcagagattgtgttattactaatatttagtctcgtgaggtgcttcattttttaaagtattctttattgtgttttttcttcatgacccatcatggtgctcgatcagttccttgttttttcttttgagcatgactaataataataaagtctgagctctggtctcatatcacatattttaattgtataaaacaactatgaagacccacactgacaagatcctgagcctaaataaaattaggtcatgtctaaaagatattgtcctttgaattaagcagaacgtgtgggtgtgtgcacatgtgtgagagagagggagagtttgctcacacacagccttgacactgataatattttcccagacagcttctactcagtgactttgtagtaaaatcaaaggagctttagtgtgtactcattttacagattagaatagtagagcccagagagagtaagttatttgcctgaaatcccacagcgagggtccacgggagctaggactctggctttcaggaccctccttgttcagtcctctttactttgagtcaactctgacgggacctggcatggtgccctgcaattactgatgatgcgaaaggtgagagcggatgaaattttagcacactgatcaatcttgagatactaaaatataccagcaaagttgtgaactcgaaaattactaaacaggctgggcatggtggctcatgcctgtaatctcagcactttgggaggtcgaggaatgagattgcttgagcccaggagtttgagatcatcctaggcaacaagaacaacaacaaaaaacaattagttggggatggtggcgcatatctgtaatcccagctactgaggaggctgaggcagaagaatcgcttggacctgggagttcaaggctgcagtgagctatgatggtgccactgcactccagcatgggtgacagagtgagaccctctctcagaaaaaagaaggaaagaaagagagagagggtgagagagagagagaggaaggaaggaaggagaaaagaaaagaaaagaaaaaaagaaaaagactgaacaaaacttgagaaaagcaatgtacccttatcacagttttatgggaaagtacacaaatgagtaaaatgcaaaataatggcattttctgtactgagaacagagataccacagagcaatcgaggaagaattagttatactgttctctgttggattacaaagcagaattctgaaaagcacacgttgtttgacacgcagtgtgaagttgcttgacgttcactgtgatgttggctgggacactgtgccgggtatgtgtgggtctacagattcatcaaatggcacatggtcagaacgaccttctttttgctaatgtcattaagtgccatctattaaaaatcaggtgcttacaaatgagagtatttaaagaatcagagggagcaaggtattatgtgtccccttgttatcaaactatattatccaaataaggatatgatataatcaagccaattctaaacagtccaaaggcaaaacaaaagaatgtgcccagtgctttcagccagtgtctggatgctaaaaatcagactgactagtcaatgaaagcgaccacaaaattagatgattttgacccaaaagaatgccttggcctcccttcccagagtgtttgccagttttccatgtctgctcttcccctcttcacccccagccccaggtggaaatgaagatggttttccattttgttttgaagagagagcttcatgtcactgatctataatgtgaaggaaaatatcttcatcaaaaccaacattcttaggaatacatagaaaataaaaagactactcatgtcttagaaaagttttcccaaaagttggatcatgttggataatgttatgatccttttcactttcaaagttccctagttcccttagagaggggaaaattatattactggtagaaatcaacatttccttttctttagtgaaaaaaataacacagcactctttaattgaaacctgtgtatctttgccctccccactttctgcctttgctttttcattcacatttaactcctgcagcaacaataacctctgggctgttctgcattagagagaactcaagagccctggaaattataatttcagaagtattgataatattaaacaacatcaaaaatttttaccacttttgcctgcccttcttacttttttcacaagttaattgaagatggaaggcagtaaagcctcgtgattctttttcaaaaaggttaaaatacaatataatctatcttttttttttttttttttttttgacacagagtcgtgctcttgttgcccaggctggagtgcaatggcgcaatcttgactcactacaacctccgcctcccaggctcaagcaattctcctgcctcagcctccaagtagctgggattacaggcgtgcgccaccgcacccagctaagttttgtgtttttagtagagacggggttttaccctgttgccaaggctgatctcaaaactcttgacatcaggtgatccacccacctcgacttcccaaagtgctgggattacaggcgtgagccaccgcgcctggccaaagtaatctatctttaaagatggtctgctatccttaattgtgtatttggtataggttaatagagtgaaagtcctgtaagctataggattagatggacgttgcctgcaattcaattccatctgtagagcagatttcattgtcacattaaacattagaacttaagaaacaagttcttcagagaagtggattgagaaagattgaagtagtattgtgtgagctgagcttgagtcagctattctgttggagaatccctaggttacatcagagaagatagccgtgggctagtcacctctatgagctttgtcatggctataattttcatcaccagtcagtccttcaaatagatatttcttagagatgcatgggtaattagagaaactctcaattcagttattaaatttttcctactcatatccagagttaactgctcatttttagcttgaacaaattagaggattgcttagtgctgaatacttgtctctttgttctataagcttgacagagctttcttattgcctatatgataatgttggaccatcttcaagtgtctacagtctttcctggggctggtatggtgctccagcataaatgcataaatgtgtaatgcagtggaatttcaactcagtgataaaattctctaaaagagagaactaattaattttagagccagaaagaggcctatatccaacctatttatgtatgtgctagagctggttactacagagcaaattagagaccaataaaaagacatggtgatcacttcaaattgaactgtcttaacagaaataaattgcagaagcagataagattttcacaaatcagtgcagtatggccctgttactttttatagcatctggattatggcttagacttattaagaattagaaaaacaaatttcagtgccatcactgatacctcaatataatatgggacaagctgttagacatcaatatgctgaaaaatggccaggcatggtggttcacgcctgtaatcccagcactttgggaggccaaggcaggcagatcacgaggtcaagagatcgtgaccatcctggccaacatggtgaaatctcatctctactaaaaatacaaaaattagctgagcatggtggcacatgcctgtagtcccagctactcgggaggctgaggcaggagaatcacttgaacccaggaggcagaggttgcagtgagccgagattgcaccaatgccctccagcctgatgacagcgagactccatctcaaaaaaaaaaaaaatatatgaaaaggtaacagcaattttcagtgagtaagcatataagtaaaggataaggagagaattgcctcttttctgtcgcattcaaggaacagctggaaaatggaagaaacatagaaggagagaaacatcaagaaatacgtattagtcattccactgtaggaaaagttcattacaggagagtcatgcaggcagacagggtcttcttagtatcaaggactgattttgataatgtgcccacatttcagcgagggcgttttaagacataagcacagcattaaggtgtttcaatagcagacatacctgtctttattgcagtggggagaaagcccaggctcatgaaagaggcgtgagcattcacgggaaggaagaaagaccaaataaaggcctaggaggaggtgagccggggaactgtacaagggagcaaaggccccttcttcagatgagttcaggatggccttagcaccagtgcttggggaagaatggctcacatcctctatggcttaccctcttcttccaaggctaattttggaggctttctagtctttcttttgggatcaaatatatcatgaaattgaaacaataaaaccaccccccatagagctgttacttggttttcacttttcatataatattaaaatctcaggactaggagcgatttccagaagctattaagtctaaccactacctccagacagaacttcacctagatagactaagggaatgtattccttattgaaaatatattccacctcattcatttacaaataaggtgtaaaccttcctggaaaaaaattcacaagtgccattataaatgcttctatggataaagaccttaaagctaacccaaagttattttgccacatatacttaggtgtcttaaataaataatatgcattctctcgattccatccttgtgaatttgcatttgggttcccacttcttcaaaagagagtgtgtttgttccatggccaattagtttgatagtacatataagtaattttgcatggataaaaactaaccatgcaactttaactctgcctttaattaagtaatcattaaaaatgaaacttgtctacttcctcctgttctgtagttgacggtgattgaggggcttggtatggctgtagtggcacaaaaatggaaatcagtaaattagagcagttgtcagacccagattctgattagctaaacagcttgcctgggttagtgattaatgcagttgtagggaatgaaatctgctttcctagaaaagtcaatagagaacgtttaatgaagtagaattatgtgacagttgtccagttgtgtgaaccatctttgaacttagtcaaatgcagatgtaattttatattaagactttaaaagaatggaaaaatggcttcaaacataggagaacaaaattttctgctttctttgtttacttcttattttatgtcaccccataaatgtgattggtacggcttttgagattattggtttagaatttcttaccctttgttgtcttgagccatcttttctctagaaacatgctaatattacagatggttcaaatgttcctataatgtcaatgtgtaaatccatattgagcaatgtagaggtccggctgtgaataggacaaagaaaaaattaagaaaatatttaaatgtacatacctccttttctaggatttaataactcgaattatttataaaatgttattgacaactttattaaaagtataagttacacgttataagattcacacttcaaagtgtacgattcagtgtttttagtaaagtcacaatgttgtacaactcattaccactatctaactccaggatattttcctcattccaaaaacaaacctcatacccattagcagaccccctcccatttcctctttccaccctttccccagctattcaagttattttttaagcagatgttctgattaaaactctgtatctgtctttggtgctttagctagcaaaaaaataatgaatataaaacaattgcctccccatatatattggtatatataatttattagaatgtttttcttttcacttttaatgaaataataatgaaatttcaatatgtataactggtgaaataattttggcaatactgtgagtgaaatgatagggcaaaaatgaatgcttttatttaactcacaattgatataaacaaaaaaatcaaatgatccagtcaggtcgagggtaaattctcttaaggaaataacaggtaaatacttttccttgagtgtaaagacacttatgtgtatttattaacacatacatagaatttagataagaattatctttaaaaatatgcatccttttaaatttattcaactagtattatcttttcactacaaacacaataaatcctggttttgcttgcctccactagtcgatatcttgagttaatcttgcacatcagctgaaagaatagagttaaagtttgtatctatgaatagaaggacttgataaactatttgataatgtaaataagagtagaaagggaatatgtagtgtattatgctaagatagtatatgtaattcatgtgagtgagcacactgatacattttaagataagcaagtgccagattaatgcatattcttgccctgattccttttcatcccctttcccttcatttcctcccctttcccatcctcttccctttagacccttgtcacactgacctgcattcacttactggaactggctatgtcccctcctgcctctgggtcttcaagcaaggcctctcctctgcatgtcttaacccaatccgcacacctcccacaccatgctggccctttgcttacttaaattaacttatcatccttcaaatttcaactcagtagtacttcccctagaagccttttggaactttccagaagtcgggtcctgttcatgttctcagagcaccctgattttttggaagtaacattcatgcttctatcctcatcttctctattttcaaagaagaatcaaagaatgtatgtatattctaatatatattgtgtaagtatactaatgattcaatatctttttagaaaatctgcaattttggactttttagtaagtcagacatcttttgcttctgagaaatctgaactattttattttgttatgactgtgacattcattccatgtgttgaaatcaagacacaagaatgcaagaaatgacgacttgccagtaaatgcccagttttcactattaaaaaaagcctggcattgctctcccagaagaataacaactcagtgatagaggggcgtaaagaccatggggccagcatatttgaaggtgatttttaaatattaactgttgtggtcttcaatgtgagtaagcctgcatttttcaaaaggtttcatatcttacaaactcctgatttctccctttattaaaatctattttgaagtaggccaagctgtcaactaaagtgaatgttttcaactaaaagatgattcactttctaacttgacaaaaataaatggagaaaattatagattatagatcaattatcactttctaatttatctctatgatttcaccctgatttattccatgaacaatttaaggtattttaactatctgacattcatttagttgaacaaaaagaaaacgtgaaaccttggtaaataagggacccccttaaactgaaactttcctaagtacatttgaaagtccataaactgacaatggataccaagatcatgagatcacaaatgtgacttttccttaagatttcatcacaagataaatcaaagtgctaggaattgtattttcccttttcctagtaatcaagtatccttctcagatgactctttttgtaaaagtaacaacttctcatctttgagacttgactcacataccaaatatcaaaaatggaaaatctttgaattctttttcctgttgtgggaatacgagtcatttataacaacaaaaaaaatcgataggaaatggatgttttagggaagtgtatcctgagtgctgtctttaaggcattgattggagactgcccacatctaaaaaatgactctaggacatcactctcatgtatttccgtgaaaaagctggtggaaaaatgtgttttcttctaaaaggctatgtgtgggacgtgtgtcagtgttcacatgtgcctaataggcatacgtaaaatcacacttgtatgaaaatcaagtaaatctgctgaaataaacagcaacccatgtttgggcatttgtgttggtagagattggcttttaaaggagaatggattaatatatgattctcttgtcggtattactatgaattgttcttttttgaggaggagtctcgccttgtggcccaggctggagtgcagtggtgcagtcttggctaactaccacctcctcctcctgggttcaagcgattctcctgcctcagcctgctgagtagctgggattacaggcacatacaatccacacccggttaacttttgtatttttagtagagaagggtttcgctctgttggccaggctggtctctaattcctgacctgatctgccttcctcggcctcccaaagtgctgggattacaggtgtgagccaccatgccaggcctgaattttcacttgcaaaattatcagtcagttcttaaaacttgaggaagggaggagtcaagaaaatgaggtgaatgagaaggctgtttagactgtttttattgtcttacagtcccatttttgtctttcactcttccttctctctaatggctgggttttcaacaataatacaggcaagcataaaagttagcaaatgagggctaacctagaattgcaaatttgattgggtttcatgttggttttccttaaataaatcaacagttttaacagggtggcatttaattatatttgtttacagaaatatttttatatttgaatttctttcataacagtgtttattgtggtcaaaggatgggagggatgaggaaataatatttgaagaccacaggggcattcctcacctctgtagtcttattatctggccttgaaacactacgacattctttaactgaatttattaggggctgaataccaacaacataagtcagaaaagggtttacattgacccctttggattctaaatattgtaataaatattattagttccgaaatatcatatctgtttgatttcccaaatgattgcagaaatgctttgatctttttagtcctatgatattgtagagatatctcactaatgatgttttttttttttttttgagatggagtctcgctgtgtcgctcaggctggagtgcagtgagccatgtttgtgccactgcactgtagcctgggtgacagagcgagaccctgtctacaaaaaaaaaagaaaagaaaagaaaagaaaaaaagaaatgtaattcactttcttctggtcagcagctgacaggatagaacacattggactagaaacctgttgtattcttacttttacccatgacatggcttcttttagaatacaaactgtttagaactaagacaggaaaatttaacaaagcattagatataaaaatgttcacaacatgtatggtctattctttaatttgagaatattttaagaaaatttgtggttgaaagctattgctgtcattgaggtggtgttacaacacaatcgatctttgaaaaagtattggcttcaccagggaaacactagacctctaccccagtgactcctgctaaagaggtctttgccatcgctgccctttctgatacctttgtgtgtgctcagattggcacactgattaatttcagataccatcagcaaaaatggaatatgctgaacaagcacttacaaagtagtggttcttcatagaacagagttgtagcccttcagtaacaaagaatgagtcagaggaaatgagttaatttaacaaattgctagttgcctaccagatatcatagcaaggaatgatatatgcaaggtgtgttaaaggcaatgtttccttaatttcttctttctatctcccatctcccaatgtcctctggggaggccgtagaggtgggagggacatattaagtaaaaagtgtgaccacttgctgagtaatttttagtgatttgttgagctggattaagtgaatttagagttgaatcttcaaaatgatcatttcctttttttaagagtttatattctggatattttcatttgaagagcagtgatagtatccggctaaggtttactaaattgttcaagtgagtttgcagaagactaagtgaaacaacttctgtataatgaactggaagattaatctgcatatcacataagcaaataaaaaacaagcaatcatatattttataatggaacaaccgtaagataaacaaacaaaaggcatagttaaaaatctgtatgaaaaagcaaattcttggtttcccaagaatccttggtttcccaaggctcaagaattttatgatttgagaaaaatacttaagtgttgcctgcacttctgtgcaataaatctcattatttcatactttattgccactactgtcatgaaattaatggatcacatttaagtattccttcttggaaaaatatcactaaaatgtaatgttcctcaagtcatagtgcaaacaaaattatatttatcatttacagacaggttttattggtcctggtgcattcatctgctgatggccaataaaagctatacaaagtctcatcaatgaaattagtaatctgtggggacaaacatgccattagtgcctgtcattcgagatttgtgatcattgacgtgctttttatggcatctgaaaatattagtttgactttaaaaaatgtagagttgtttctattgttggatatatttataaaattctgaacataaaaatgctctttggtagccacttgaatttttaaaactatatttaataaaatacagcttttaggaatagcaatcagcatgggataggtgacaatgaattttttttttttttttttgagacggagtctcgctgtgtcgcccaggctggagtgcagtggcgagatctcgctcactgcaagctccacctcccgggttcacacctttctcctgcctcagcctcccgaatagctgggactacaggctccagccaccacacccgggtaattttttgtatttttagtagagatggggtttcaccatgttagccaggatggtcttgatctcctgaccttgtgatctgcccgcctcggcctcccaaagtgctgagattacaggcgtgagccaccgcgcccggccaagtgacaatgtattttaagtagcctctgctatccttgacgaaatgtgctaaagtggcaaaatgtttgctttagagatgtacaaaagtagaaaatttgtgaaggacattaggtgtttctccactttgagaggggatctcctcttgatctactctttatttcccatcccagagtgaacaaggtactagttgatgaattcgaatcaggatacttgaaattaagacttagatgtagcactttgtgatctgtaaaaatcatatcagatcttaaatatgaaaatgtttgagtttagccaaaatcaccagcatcattggtgtatatcaagtttaatcctatccttggaataatagaacttcaaggttggaagatgaatcttgaatagtttgaagttaaaccctacctgccgttgcaatgagtcccattgaaaaacatttcctacatgtcctcgacaagtctttgctttctttagttacaaggaattgcccaacctaccaaggcttccccattttatctttgactatttctataaatttctttttaaaaattgtggccatattttaagacacagagggagggtagacacctagatctaaaggatattaatctacttaagaggaatttgcttatggaaagatgatctagcaaatgagataaactggactgataaaaattatccaaactcaggtttagatgcctatagcagtttcacaaaaactaaatctttgtctctaatggatctgagctgatagcagtgtagtagagaccaaaggtctgtgactgtcgtggagaagccccttttggatgaagctttacggaggattttcaaatgttaattatatttacaaacagatcagatgtaggcatagatatattagaatactttatatcttctctcatttatttttctactgctagataaatgggacttataagtagctgagtaggcaaacaagaaagaatgcatacagttttatcaatttatctgagattttgtgataagctacagaccaagtcaaatggactagttttggcaggggcttgctgtccatatgatggtcagttagcttttttctgagttaaacttgaaaactaagaactttaagaagtgcatgggtatatataggtgtgtgtgtgtgtgtgtgtttgtgtgtaattttacaagactgtagaattataaaatgacatttgttttaaggaatatttgattgacagtttcacttaccaacgttagcctctaattatgacactgaggatacccaaatttaaaaatttcctttataatggtccctgagacctggtgattgaggtcataaaaaaggaatggtagttttctttcagaattttaaattttctcaaataatatttcaccaaatattagccacacttgtatactttgactctgttggtcgttaaaatgtatagtcataattactcctatggaatagggatttcaatagaaagaaagctttagaaatgaatcttctttgcagataaatgctatttaattttcagagttaatataattcaaattatttagaagtttacaagattctattataaagccagtttatttatttttttaattccattatcatctgaatattctaaaaaatgtaaaaagaaatctatttgtagagaaaacaatgccttttaaagaaaaatgtattttgtgctgggctgcagtcttattcatcacttgataaatgatgcttttaattcagataattagagtaatttgtaacaaattattagatatagcagacttgccattccatttctataaaataaaaatacattgtaatgtttacattgatgagtaataataacaacaccttagtagttgtaacaatatatgacctaaaatcagtggtaataatgtcctatgataagaagattgtacaaacttaaaagctagattttctttcaaatcttttgtcatactcctgagagaaagatatgaggggaaaaaagtcactatagcaaaatgccttctcagaactgtttcagagcaattgaggggagaaggaaagaatcagtcagagattgtttcaaatttaatatgaaataaactgttacctttaactattcagcaatgacacagttatatttcattccaaaggtgtttacaatcatatgagtgggtttctgtattcaatgttacaataagtcaacttggaatttcccattaaatatgatattaataaaagatttaggtacagtcccctggtgtgtttgaagctgtgcactctgcaaacacataaataaaaatatatctaattggtttgtggcattttgagattttttttttcagaaggaatgtacttaaaaaaattaaattactgcagttttctttcagaaaattgggcttttgtattaaataatgctagtccaaacttaaaaataagaatatttaagcctggtaagcatctttgttctctcaataaaaagaaaaaaattagagactctctttctccctggcctcatacccccatcatcttctgaagttatatgtatatgaagtattttttttaatctacagggataccttttaaataaaatattcctttattatcataaataatctgtaaaacaaaataatagtggcagtatttgtaataaagtcctaaaagttaaatcatccttattatacttaacataatccaaaagactcctaattaagttttcctttcctaacttatattatcttatgatgatctacaataattttgatgatgttctcaaatgttcttatatctgcttctgaaatagttaaacagattattgaaaaagacctctgaaacaaagcaaataaaataatgcatagaaggaaacagcttttagtcttatctctaatggaatcatgttattgagttttctaaattatggaagatgtcaaaggtcatttagagctagacttcatgtgaagaattcttaacttgaattggcttcagaaaaagaggtccatgaaactccaaaattgtatgcttggtttttatttgtacatgtaaacaaaaattgatagctttccccaaattctgaaaggagtccttagctctcaaaatactgagaacctccattgaataagacatttgagtagggactttgtggtcagagatctgagtttgaatcccagctctgctattttccacctgtagggtcttggcaaactcctaatctgtctgagatattgtttactttctaataagtgcaggtaaataatacagaatttacaggttattgtgagagcctatgagatcatgtgtatttttgccctggcatgttgaagtcacacaataattctttcctttctctcggtttctctcttttaagatgacaggaatggttagctaaagcaactgagtgttaacatgagggttcctgctctattgcttgttatcacacatgggtacatataacagtgactgcctataggaagaagtcattaccccgggacagctttcactggtggatttttatgatggaaagcaaccgcattaactgcaatatggcccagggtgacacttgacatctgtatgttttatttttattaaaaaagtaatttaaattattgccttttctttttattatggaagaaaatgtaagaatgttgactgttcactaagccgaagattccctttttgctttcaaagcttttctcaaggacattaaacactcttcctaattactttttattgatttcttgacatttctactcaacattgactgcttatttttaggaaacaaagaagcctaagtgaaaaatgttaatggtgcatttgaaactacaaagttcaatattttagtcacgcctcttatatgtaattgtaggtaaaaactatataatatttttgccatgtgcctcagctctcttatcaccgaagtaaatagaaaattctgtgattctcagatttcttccatagctttaacttattttgaacaaatctgtgacttaccttgctatatttcaaattttattttattattattcatttttatttttatttttttgaaacagggcctcactccattgccccagctggagtacagtggcatgaactacagcctcaatttcctgggctcaaatgatcctcccacctcagcctctcaagtggctgggactatgggcccataccaccatgcccggctaatttttaaattgttttatttgtagagatggggtctggtactactatgttgcccaggctggtctcgaactcctaggctcaagcaatcctcctgcctcagcctcccaaagtgctgggataataggtgtgagccaatgagcctggcatattttattatatatatattttttgtctcaagaggttctgagaacatgtgtgcctgtatttcaaattttaaatgagtgaagataaggcttggcatagtcaattgaataaaatttagtaaaaaatcaacggaatactgaagagactgatgaaaattacacaaattaactcacattttacattgttcttccaattttgcagttatttgccattagtaaacactttaaatatgtctgccactctgatttttagcattatttttgttaggagtaactatgtaaagcaagtctgattagatgatcctcatatgtaatttaaccaaacgaaagatgtcttatgttaactatttagaacagcccatttatttaaatgttgctcatttaaattacttgacagtcaggaattaacttttaattaaggagtgctaccatcagacctatttttaagagtttcttgtgtgtgatttgcatgttatatacaaatgaggttaaagaaaattacaagtcaacaaaatgaacctaacatcaaatgtccctggagataatttttttattttatgtaatttatctgcatctcttatagaaatactttttttgtcttttctccctatctctttgttgtgtacaatcagcttttaaaggatccagtggtattaattttgcattgcggtcaatcagagatcttatgcaaatattaaatattgcacaggcatcataactaaatttagcatttcatttggaatagttccttgtgccataactccctgatggtgtttataactcagcatatttatatttgtatgtgcatttttatgtatatgcatttctctttggtctcataaaaaagtaaagtgtgtatttttttctaactctacagtcattactaaatgaaaattaagttgtttttaaggcatattttttaaaaggaaaatgatgttaatctgaatgaaggttaaatagaatcccttataacactctggcactatgtggtcacatcattgaatttctgataactttcatattatactttagtctaactactcaagatcagtttagttttctagtgtttaggaaagcttaatgaaaaatataagacaacagacaactagaaaactagacagataaactgaaacagacaacagaaaactagataatatagacagagcgttttccgtgaatgaaaactaaaatgcatcagtttgactcacagtggcctcctgccttctgctaagtatgcacaacctaaaggtaatattttaagtctcattctctgacaatgtagtttgcaaacatagagaaatattcagatgtagaagaatatggcttctctaatggccttgtttgtttttagctacaaggtgacatatatagttctggaatgaaagaggcgtcatcgggcagaatatttcagtggctgtattatgggcctagcaagtaacctgccttggaattcctctttattattttgagaacaaaggcatgccatttaacttttttcagcctcagttttttttttttttttccaactgtgagaaagagaaagtgtcacctatttcttgttaaggactaaaggtgttaaaatgctagaatgtctggcacatagtagatatttaatgaatgtcagtttatcttgtcttagctaagaattttcatgctttactatacagataactcttggattttatctgcattcatttcttctccaaaaaaagggaaccaggaagaagagaagcaaaagacataactttacaatgcctagctaacattatcaatgccaaacacctactggtcgtggtaaaaatgatttctacttcaaaagacaagattgctgtaaaaaatcattgctacactatgaagttatgctgtaatgttacgctatgaatttgttgtgctataaagaggaaagaagatgtttaagaacaaaacatgctatccagagcacacctccatttttgcaattacaaaatgtcttctttctttgcttctcatttctccagttcctccctcgtgacctaccttgaagatcacctataagcagaacatgataaatagcatgcccagtagaaatggtagttgtgagcacatttaaagtgctctgtgatgttttactctcagctgtattgaaatatagttggtgatgactcattctagaaatatgactattaagaatgagtacatttatttcttcaataataagaaaaccaacagaatggtaatcccagaatcttagttctacttttaacatttcacacccagtaagttggataacggatggcagagtgagcctgcgtaggtaataacttattattattacccttaccgtacatggcccttttccttgtacttttctccttgagccaataatgactttgatggttcagtctttctgcactttgtagaaaccatatcccaaacagtattttctagacatcaattctagcatgtgaaagaatctagacagcctctccgattttcatgcttctgggacagaaaagtatttatcacaggtaatgatgataatccagttaaatttgttatgcctttccttactttcaaagttaatttccatttttccattttggatgctgtgttttatggaaattgtctgtaaagagtctactagccttacatgtaatggtcagcagacatatttgatacctttctttttcctttagtaaaaggagttgtaagtaaggagcaagtgaaaagtgaaggggaatttagtatgtctcctatttggcagcaactgcgcatgctattcaatctttaaataatttttaaggaacttgtctcttattgtaaattatgtctggagaattagaagtgctacacataaaaattctgtctttggaatcagtacagatccatgttaacctcgttaaaatgatgacttctcatctaacttcaaatattcatttttaccttattaagtcatagagtttagctaagcactgagggtatgtcctttttgttattttgattctgaaatcctcctgatggtttttagggtagttatggttaagattttggtgccacgcctgatatttcctaccattactgtggtagtgatggatttcttctgtctggacctccgcttctagtggttctctgatctaagcatggttggaactttgtactgacctcatactatgcctagtcacagagcttgtaaaatacagccaaaattttattaattcagctatatctcttatctctagaattggatcatccatggctcctctgtcagagttgtgaaaatggtcagctttgttacgttgagcctgaagcactgatcccacaaatcaaaagaccacgtgactcaattcctagctcagtcatcttttctctttcgacctttgtgtatatacttagtgtacctgtctctcgaaagtgattccagcaacatagattacataccccacttaacagattaaatttcattagacttatcaacgaagatcctttgttgccatattgctgctatgatagtcctatataggaaactccagcttcccatcaggatttgaagctagactttaccataaattgcaacagctgccagcctgttgacccaagaaatgtggtgcattcaaaaagaaggaacaaactcagacaagtaaccagctctgtacatcaaaaatccttccggtttcggtaaactatcctgtgactatctaactttagtccctgaagggtattacgccttatttaccttacaaaactggcatcctagaccttcctaattgagttgaacttcaaattcattgtctaaatcctaagaaatgttgaattttcacaaaccccatttcctgcctgctctctccttttctcccatacatccaccatcagatttttttttgtttactttctctctgataattcatgagtaagtttaaaaaaaaaaaaatgtgtggccagagttttctgttttctgtagatattgctgtgggtttgcccatgcctagttccaacttttaaataaatatatataataatatatttatgttataaatatataatatatttgttataaatatattatatatttatataattaaaatcttatatgtaattataacataaatatatatgatattatatacatatatatatttctttttttttgagatggaatctcgctctgtcaccctggctggagtgcagcggtgcgatctcagctcactgcaacttctgcttctagggttcaagcaattctcctgcctcagcctccccagtagctgggattacaggcacacaccaccatgcccagctaatttttgtatttttggtagagacggggtttcaccatgttgagcaagcttgtctcaaactcctgacctcaagtgatctgccgacctcggcctcccaaagtgctgggattacaagtgtgagcccctccacccaaccgaaaagaaatattttgatgctatgaatgcatttgtcatttctattctgtttcatccatgtgttcttcttgtttacctttgtagtagtcatttacagtgaaaataattgacaaatgacatggtgttatgttcttgaaaacaaacatacaaacaaaaacaaaaaatgaaagcagacaaatgaacaaaatggccaagtaggtgtttaaaggcttaaattgagcaaagaataaaatggtattttttaaatgttaaagaatgatgatgtgttttaatagtattgttaactattgaatcaatttatgtttagtctgcttaaaattatatttggattcaagatggactactgctatcaattgattagattgaaaacaagcaagcaagaatctagacaacacaaatgggggaaaaaataatgagatgtattggacactttcctggctgtaggaaaagagctttgataaaaggagtgatgagatataattaagcacaaagtaacctacatgcttatttatcagtgaatctttcagttccagatcatttcttctacaaaaaactaaagaataaaaatcagtctttcagtcactgggtgacaggatgcactttgatttttccaggaaaggaaagccaggatcacaggcatgcgcatgcacacacacacaaacacacacatgcacactcacacatacacacacaagctcaagcgcgtgcacgcacagtactttggcaagtagagtgttagctccccaagcatgagcttcaggccagactcagtggctgtgatagacccatgcagccatttgacagattttgataacctttttattcaaagcagcatgaagggccaatgaaggattgctgatttttttttaagacaggatcttgctctgttgcccaggctggagtgtagtggcacaaacatggctcactttaactttgaactcctggacctcagtttcccaagtagctgggaccacaggcacgcaccaccatgctcagctaatttttaaaattgttgtaaagacagggcctcaccatgttgcccaggctggttgaactcctgtgctcttgccatccacccgcctcagcctctgaaagtgctgggattacacgtgtgaacaactacacccaactggattgctgaatttttataacatgtctctggtaactaagatcctttgaactatgaccattgaattcctaggacttgtgtgatctcagtagagcaatgactcacttccctcaggttttcagacttagaggaaaatccaaggatcagtctgtagtataatgctaggcatgaaaggcatgaggaaatgatgggagcctccagacagaaaaggtctcccactggtgactgatttctattcagagacaatgccatccctgtgattgaagctccaacacactgaaaaggtgtgaaaccaagaaaagtctctctttcaataaaagttttccatatttcaaaaattttcagaagtaaggatttcttaagggaaaagccatgaataaatcaggccctttttttttttttttgagacagagtcttgctctgtcgcccaggctggagtgcaatgatgtgatcttggctcactacagcctccgcctccctggttcaagtgattctcctgcctcagcctcctgagtagctgagtagcctcctgaggcgtgtgccaccacacccatctaatttttgtatttttagtagagatggggttttgcaatattggtcaggctggtcttgaactccgaaccttgtgatctgcctgccttggcctcccaaagtgctgggattacaggcgtgagccatcgtgcctggcctaaaccaggcctttttaaagaataggatcagaggtctggtttcttcttcttagcaaggtcttgttttcctggtaaggccttgttttctgcttagaggcatcactacaaccagcctgtcatctgtgaactcttcccttggtgggattcagaagtgtagctcctgcatatgtctctccattatgggagtcactggattctgtggttatttaattagaacatgcctcactaggtgttggctacacctatttgagctgaactagaaatgcaaattcctgctacacatattttgcattacaaagtgttctactttttgaaagcttttgagtaaatggcaaatctcaactgaagactttgactcttctacaggaactgcatggaaatgtgaggaaccgaattggaagaatgaacacagcctaccatttggttttcaatgctttgatttttaggtggctttgtagtaatggatggaaagaacaaagatctgtattaaacacatgcttgcagcgtctacaaaaatggtttatgttttaaaagaagcaggggaagacctcagtcattctgagttattacagctccaggagatggaagtgttttattagcccatatatatatagatagatacagtgctaccaggaaaaaactaatgaattataactaaggtcctatgtatggaccttaatattccttgtgtctgacgatgcaggaatttagccaggcaagctgagataaggccctaacctttgctctacttttctttttatgatcttcttccacatgcccttttttggtttaaatataaccaagatgatttccattagatttttctaacaactgcatgatgtgtgtgcgtgcgtgtgtgcatgtgtgtgtgtgcatgtgcgtgtgtgtgtgtgtgtgtgtgcatagcagcaaagccagatgatgatagcaggatgcagaaccccaattttttttaatattatgtaatgtagaaaaggagtgtgcacacctgtttgcttccttcccattgaacaacattaggttgaaagccaacagtagaaaaacaggtgcttgttatgtttgagtgtggagccccaaaaatggaaaaagaagaaaaagaaaaagcaccgggttttagggaaggcttctttaggcataatgtaaagttaatttatcattttggccctgttccactaaagacacagaatttgcggcaatactacctccccatggcctatttctctgaactaaaatgtacattttctttagagaagcaagaactattatgaccagctagtcctggttttgggtggcgggggtggcaagaaaaaaaaggaaatcgttttctttaagtaaagcacttaaaattatatgtttttttgaaactggttttattcctgttcagattggtcatgagtgaaatgacgtagagtactttaaaaagttagattttcatgtgttatttggttaccatagaatttgtactggaaacctaacagcagatatacatttaataacacaatgtattacagggagacatgttttgctactctgatcgtgaacttgggaacaaggaactcctgggagttgtgggaaaatatatggactgaaattagccaagtgttatggagcaagattcatatgctcaaacctacttttactgcttcgttgctttccgtgcagcaatttctggcctcagtgaggaaaatgttgtgtttgtggaaacataaactggctatttatgtccacaaccatcacacaaacacagaactgcagtgatttggctaaatggtatatagcaacgtgcagtctggggttttagagaggcgtgtttcaagctgcatgggcgacattctaaggaatattaggctttttacctgcaaagccactgttcaaagaggcctggctcaaacccgaaacacttggaagattgtgtctaaatcctagaacccactttttgctacacttttagggaggctccttgcctcaaagtactgaaagtttagattgtttaaaacatttgtcagaaatcatttcctggagtgaagatgcttctataactcataggcacatcactgccttcatcatctctgtaaaaaacatatcatttcaagccaactatggtattgtccatcttaatgggatcctttatatcaacagacacgtagtctagtgagattaggaaagcacagtgacagctttacctgtaacagacgttttagtgttaccggtgagtattgcatattgagaatgggcctcagttcctctgttaacatgatgagtgtttcctagattgcgtgaagagtaatgagaaaatgtgtgataagcagtttgaatgcctttgaaagaggtgtagtacaaggtgtgaaatacaaaggaactccagcagttagctcttctcaaattttcatgtatataaatataaagtagtgtcatttcctgaatatgatccctattctttttccatcattttcttgcaaacactgttatcctcaaaccctcttctactctcacctccttcactagtctcatctccatgttttcccgttccaaaggctgcaggagagaccattagtttcattaattatggccctactcaaaagcctaactctcttcatggcctacatattaaacattaattccaaccagattatcaatggcttctctggtatggttgcattattattttatagcttcattaacttcacctccttatttataatccatgtcctagtcaaattgaactgctgcctctcaccaccaaacatgacatttactttcttacctccgcatttatttgttttttccctttagtggaatgccatcttctcccacaaccataggccaaattcaccttcttaatatatgactcttttaatatagttcccattctcacatttattgttaaattcatgcctgactgacctaactgattgatattttctgttgctgctgtgaatatgatcacattatttcactgggttttcttgatggttactactggtatccaaccatatcatctccagatcgtgattattttatcttctcatcttctaaagctgtatcataatttttttattcctgccttactgcattgattagaacttttaagagcaatgctgaatagtagcactgatagtcaatatcctttacttgtgtttgacagtcatggaaatctcccctagagtttcactgttaaggatcatttagattattagctaaaagcagatattcttagtgatacagaatatcattctagttttacaatataaagacatgttttgaaaaacctaaaatcattatatttttgcatttttaaattttaaatataaatataagcatatatttaaacaagtacatatataatatccatttaaacatgcatattaaaaacctgaaaatacaagggattgtgtaatgaatctccatgtagccatcacccacttcagccgttatcagttttgtttcatcttcatcccagtcatttcccttctctcttactattttatagcaaatcccagacatcttatcatttaatgtataaatatttcagtatgtatctctaaaagataaggactcttctatttttaaatatatccataacatgtttgacacacataaaaattaatgataaccccttaatattattattcattatctaatccatgatcagatttcctacatttgtaactgtttgaatcaggatctgaataaaattcacaaccattttgattggttgctatatttcctaatgctattttaagtgttgatattcgaatttttctccttttttcactctttgtttgattctagccctagctccctttgtctcttttttctacgtttaacttttttttaaagaaaccaggttgtttgtcctgtaaagttctctgggttttattgcatcccctcttgatgccacttaatttagtccctgttggttacatgtatgtggatgtttgattaaattcaggtttgatttttaaagataatactgaatagttttacaaaaattgactttctaatttcatcaaaggttgattcggtatccattgaaatgaccatatgacttttatttgttgatgtgccatgatgtttttttttaaatttgttgaataagataatgaatttaccttatgatttctctcttttgacctttcagctactttcatttctaagtgggctttagttggtgaataaattaacatgtcattaaatgtcacatggtaatttcagtagcttgttgaataactgaatccttgattcttgttggatgttcagtcctctttgttttgatttgttttgcttggtacgaaagatttgactagtttggaaagtgacaggttaacattttctacattgacttgaccttcttccacccaaaatgatcctggtagaaaatgcagagtatagtaaagaatgtgtgccttccacatttagcctggtgaggtctataaatatatcaaattaagccagtcagatggcctgctgatatttgctttgcaggctagacggattgtactcctttagaatctaagtattgatggaaaaagattcaagggacagcttgaaagtttgtggactccggctatggaaattttatactcatataaaactgtcagtgattagtagaaaatatgtagcagaactgtgtttctggaattggcttctcagctaagaaaagattattggctttgtgaagaagaaaatgtagctttcttgtaactccatttagtcaattatccactatgggaagatacttttcttcttctttggaaaagctatgacatcctccatggtattcgtatcattgagatgtttctcctgagaaatagtagacttaggatgattagactgtgccatgagtaaaatgcactgtctgaaaaaaacagaaaaaaaacagcaacttgtaggtttgaaaaataacctttcctggcaatcttattattctaaggataacactgtctaatgacaccaaatcatttgctcagccactgctgggaacttagaatctgctttctgtttagctacaaatgagatcagtgttacaacaaaaattataattttgttttatcaggagaaacacccaaaggtcacttttcattctgctgaataggaagaaatgatatcagggtctgcccagaaagcttgtaagggagaaaggaatcttacccacttaggaagcattttctaattcacttatgtgaccttgggcagccttcccctgtgcacttttgtgaattcttagctagaggtattttactaaagactgcagaactattcttttgagatgatctgtatcctcctttaaaatataggataaactataaaatgtgctaagatccttgatagtcctatcattctatatatgtttgaacaatgccaaagcccaagttcatcagttaaaccagttaatctccattggcccttggtgtcaacttgttctttggacaaagtgtcaccttgtaggaagtctacaaacctctaagtgctcccagcgtattagctaagtcctgagctccatggagttggatgccctaattctgctttagaaagtcctagttccattaaccgtctcctgagaattctcctggcttccctttttgtttcttgagcagagttcagtcaaggagaggtcaagagagatgatacattacttccagtcactgtattggctctgggaacctccaactctatgcaggttctttgatctcctctggccactttctttctttttcaagtacatatttgctattcagcaaaggattgaatgacttctcaggaaaaaatgccaacccagaatgacaaggcttccgtggttctgagcctggctctgaacctttcctttggaaaactaatgactccacctatcattcccttggcatctagagaagctacattaggtggcacagctctttctgctcagcttctgctccagagcttcatcttcaggaaccacctaagcatttttttccccagtaggagttcagtctgctcattatacctaattgcaaaggagctatattcagagcaagaataataatttcagattttttaactggacttcaaagagcaggaaagtatgcagattcctaaacacataagcattgaagatattacaggtaaggttaaaaaaaatctgtaattttgtagtgactagcagtttaatattcaaacatttaaaatgtgcatattttattaagcaaatggcgtagagttatttggtttaattttctgtaagtaactcgtaaagaattgtcctaaaagctgtgggtgaggactaattcattcaagggaaacaggatctaatgattgctttgtgaggtatatatacactgtatactcatgctaattcctgctaattgtcaaagaagaatagtggctttttatcagcagtttgcatttgtgtaatggtcctggtctactggttttgtctacttcactgataaggaaaacaccacttaaaacaagcaagaaaagcaagccatcctttacagtattattttctttttagcctgtcttgagaagaaaaaaacctagccttctacaggaaatactgtttgattccatgggaaaatatttagtaacaagcagagaacacttgattatttctcagctatttattctgagtatttacaaaatgggcaatagtattatttccaaaatcttaagttgtaaacgaagtttatattacagtctacatgctatggatatgacactattttaaaatattttatactttaaaaaattgttataacacataatacataatattgtaagtaagtttaattcttgtaatttggaaattcagtcagaaatattaaagaattatgtagatcttgaaagggtaaaataatcctgcatttatgatattaatttctcttaaattgttcaattttattttataaggaaattaagtggttatacatttttgacaagtagttttgataaagttaaacacagattattgatatttacttaatgctttataatcactcaatgattgtcactccaaattaggccatcttttttcacattttgcagaagaataatttcctaagaaacaactattgaggcttggttatatatgtaacatttcagtctgggcagaatttctttttttacttttgtttgctcaatatttatgtcattagtaatagtaacagtatcatatatttgtgtgcagtgttgcaactgacaaagtgttttaataaacttggcaacaaccctttggtatccatttttgcagctgaattttctaagacaggtagatagagagaagtcccacagctaataattggaaaattgtgccttggacctgattcttcccagccaacttcagtgttcatttcagtacattttatctatgaagggtttcttctagggagagttggtcatggtcttacaatttttaaccccagtgattttggttgttatcattatgtcttgcacataataaacagtcactaaagaattgtgggtcaggcgtggtggctcacgcctgtaatcccagcaatttgggaggctgaggtgggtggatcacgaggccaagagatggaaaccatcctggccaacatggtgaaaccccctctctactaaaatgccaaaaaaaaaaattagccgggtgtggtggcgcatggctgtagtaccagctagctactcaggaggctgaggcaggagaattgcttgaacctgggaggcagaggttgcagtgagccaagtttgtgccactgcactccagcctggcaacagagctagactccatctcaaaaaaaaaaaaaaaaaaaaaaaaaaaaaacaattgtggaaggaggtgaggaaggaaggacggaaataaggaaggagggaaagaaggaaggaaggaaagaaagaagggagggaggggcaggctgaaaggaagaaagaagaagggcatgaaggaaggagggagtccttttgtgtggtaaaggatttttggaacctctaaatgataatagtagtcccccagttctcagctatttcagagaactgtccagcttccccagcaatgatcatttgtcctgaccttttttgccaaggcaaaccaggtctagagtaaaatactacaaaatacattctctggtattaaaaaggaatggccaaaaccgtaattacttttgcaccaacctaatagtaagtttctgctttaccttatactttcttccttataatactgtagttgttgacataccaaggaaagtgtgtttgggataaagtggtcacataaatggcaaacatcaaagtaatgtcagattttgtagtgtttctaattgctgttcattttgtagtcactagaagacaacttacaaattgtgaaaaactagtcataaatcagagggagacaaggtttagtgagatccagttcacctccttcctggaacaactattggggggtatcatcttttatatattgaaacatattttatcttccaaatctttagtttacctttaatacaactcctcccagcccccccagaaagaatgctgtttgctctgattggcataggaccggctttgtcggtttcattacatcctggttgaattaccaaatggaaactgatttaggaatactgagtgtgtacggcacagagaaaaaatatcactgcgaaatttataggcctgtgtaagactgtcagggccctgtgttcaaataaagagagcaaaaggaaacctggcgaaaatcaccatctccatcccggcttcttccgacaattacaacttattcctgtgcttggctgctggtttggagcagctgcatccactcaggtaacacttcgcatcacctgggagctcattgttgccttacaattcgtgatcattttttgatctcactactgctaaaggataaaagtgctaagcataataatccataactgtatgagatacttgctacttcatttccctccaagaatcattttgctatgaaatatcccattactagtttcaggtaatgatctaagaattttttaaatgactatgtcagagctaggggcttcaggatagcattacaaggataatcatttcagagagttatatttttaaggccttttaaaaagagggttgtttctagtttttaacatatttgttaatcttattttgatgatctcataaaatcagagtctaaggaagagatgtgtctatgtgttgcttatgtcactgcttttttttattgtttacattttataaggagtgtctacatttgggggggagttggaatgttggttttgttgtttttagcaaaagccttggcatttgtcctgagagagctcatgcagtgtttgctgttcaggttgcatgaagggcaatctttagcaacctgtcagagatgcaaaggccactagggtctgcttgaggttcagagttcctctgcaggactgcgtggtgacagcacaccacaggtggcccattcagcactgtcatctgggacagcaaggataccctgctccatttgtcatcctatggaattctgtcagcagttgaaagcctttcagcacaaaacctttaacattcgaggcaaacttcctaatttttttttttttttttttttttttttttgagacagagtttctctctgtcacccaggcttcagtgcggcagtgcaatctcggctcactgcaaccaccacctcccaggttcaagcgattctcctgcctcaacctcctgagtagttgggattacaggggcacgccaccatgcttagctaatttttgtatttttagtagagacggggtttcaccatgttggtcaggctggtcgcaaactcctgacctcatgatcctcccatctcggcctcccaaagtgctgggattacaggcgtgatccaccgtacccagcccatttcctgatatttttaaaggcaattgccgtggatgaaaatattaatacatagcacctaaataagtagttttttacatgaaaggatattatgttaagattatatgctgtgtgatatatagaaatgttgtatactccatgattttacagaccaaacaatgcaaatcatgtttcccctcttcttaatgaagatgttaaagtataactgataattgatggtaaaaatcacctgtctactcattctttcttattccttttgtttagtttgtttgctttgtaagcctggaaaagatgccttgaaatgtattttgaaaatagctttttgttggagtaataaaaaattagtccaattcttatttatccatagtaatgattccagaataacatgcacatccttaggaataaagttctcctttaaaaaaataaataaatagcatacatctttgaagtccccagatttccattgtcaagatttttctctcttatacatacccaaattaagagccttccctgcttgcccattaatatttgctattattcattgaatgccaatttttttttgccaattcctttatctagattatttataacctctacagaattctgtaagagtgccattacccctcttttcttaatgggaatattgagcatctgagtggttaaatgacttattcaaagccagtaggagacaagacttgaaccacatctgtctccaaatccaagttgttttgagtgtcttttgctgttattcgaaaaagccatgctgagatcaatgaaaggggtccaaaaacatgccttagacaggataataagaggtaagcaaggccatgagtaattcagaaatggaataatcagatattgagtattccagtcagatagaataaaaatcaagcaggggagaagacaaaattaggttatgtgtcacaacaaaatgtagactttcgaaggaaatgaacaggaaaggcagaagaaaatggaaaagtaatacatggcaggtcaaataaaagtaaacaaggtcatatgaaactcacatgcaaataataaagtagaaactagtaaggaagacagaaaggaattaaaaaggaattaaaaattcataagaatgttatcagtagacaagacaaaaaattgcctctaaagatggatttttttttttttcctaaaagagtatatagaatctgtactggcttgatatactggttttgcttttcatcctgaaaatatcattgataaacattgtgtatattagactatttttggttgggactgagtattgcccatggtgttcccaatgatatgagaagaaacatcctggtactaaatgccctggtggcctggggctgagagctttggctttgtataattcatgcacccactttcatgtaacatgaagtttgacaagtgaatattaagttcattatatgaaggtgttgcaaaccaaacttgaaacttatttctacctctcattctaaatggagatattttgtagtgctttagtctacatttacagtgatattagactctttccatttccttaaaagtatgatggcgtttggacattcaaccatgttcctctaagaaattagagtagaaaagaaatttagaagagaatggcttctaatctgcatgttgatatgtatctgactaataatctataatgttttcatttggaacaaataagccaacttgtgtttctttttcaatatatacatcatgtctaaaaaatgtaaagtcaataggcatgtaaaacatttcaaaaataaataattttatcaattgattgccattaaaaatagatgtctaaattgagctgcactgacatgactttataccattaccttgaaccttcctgagaaatgtattttgcttaatgacaatagagcttctcttttccaactacctggaagataaaatattggttaaaaaatgttgagcctcttttcctatttagttatagtaaaattagttaactctataattctctcttttataatttgattctatgtagtgagaccacaaacagcttaacttctctgctattgtttgtaaggtctgcaagtttagtgaaatctgtaccttatatgaactcttccttttaggataatttaagattaaaggctgcttagaagggggaaaaaaagtccatgttaacctttctcctttctctcctcttcagctacatctacatccaccactgggacaagccatcttgtaaaatgtgcggagaaggagaaaactttctgtgtgaatggaggggagtgcttcatggtgaaagacctttcaaacccctcgagatacttgtgcaagtaagaaaagaaatcctgtgtgtcgcttatgtctataactccttgtttcagatgattctatgtctcatgatgtattgttgctttttttccaattttgttgcatcatgttgaataatgctgttttatatgtagagtgttttaaaacattcacaccattcgtcatcactcctctgtcatatgcagaattgttttttgctcttttcaatgtgtgtgaggtgttttttgtttttgtttttgttttttgccatgttatttatagtgttgctttccttgtggtttttcttgttgttattcagaaaagatgtgcagatatcacagaggcctataacttttggtatctacttctacatccaatgtatgaattaagctgtaagataatgttgctttcttatcccagtgatcacctgccaaatgaataagacaacaaagagaagcagaagggcagaagattatttactgacatatatctattacacttgggattgtcttactgttgcataactattttttaaacggagtttagttttatattgctagtaaaaaaagagaaaaaagtaaattgcatatatttggaaatacattgtatgtagcatccctgtgggtgacagcagtgttctttcatttgtctatagatatatctagaatagcactgtctttccaatgacctgaaggagttgatgcaccattaagaagtatccaatttaggcctgggcacagtggctcacgcctgtaatcccagcactttgggaggccgaggcgggcagatcacgaggtcaggagattgagaccatcctggctaacaccgtgaaaccccgtctctactaaaaatgcaaaaaaaaattagctgggcgtggtggcacacgcctgtagtcccagctactcgggaggctgaggcaggagaatggcgtgaacctgggaggtggagcttgcagtgagccgagattgcaccactgcactccagcctgggtgacagagcgagactccgtcccaaaaaataaaaaaaataataaaaataaagaagtatccaatttattctctctcaacaggcagcgtaagatagtgatagtatcagtacattaaatatttaaaccttgtagtaaaaactaataggactcattaaaaagtatgtttattttgccatgcattttaagtttactgttgatatttagtctacatatggtatatggacttaaaatttgatgtgggcataaaaatatatttaatattttattgaaatgatgaaaatacacctttgttttcctctttaccaacagctatatcccaaaagcaaggtattttaaaagtcgttccttaaaaaatgtaatgtagaacatctaataaattttgccagcagtccccagcgaaaacatgcagtggggacattattctaaagcagcaatgcttgttctaaaggagggaaaaccattttgtcacaaaaactgttttctgctagaatattggcgtgtgacttaaatcttgacaaggaagaacaagtctgttagagaggcaattgaactgataggagcaattagcaaaatgaaaaaggcaccagaaatagtcaacaaagccatgtcccttttacatcacagaaatactatataaatatttaggtgccaattctaataaaatcttaattatatttataagtaaggaagtgcatcttaaaaaacatatgttttaaagacaaaaaaagcaacgatcgaaaatgccattttgtaggccatgttttgctgctctctgagctgtggtagattgggcgtgtctgtagcgtgcctgatgggacctcatggctctgaacaagcaccttccagaacttctcctttgttgcactctaaagctcttctttgaaaaaagtagatacagtgccaagacaagtgttggtggttgtatagctgattttatcaaagacagacaatttgtaaaagtaaatgtaatctgttagagtgaataaaagacttagagccagaacagtaaaattctaatctcaattactaaacatctctttcacggaaataaataatttttataagccaaagtgaaatgataggtaaaagtcttgcaaaaaatattaaagcaagatgaaatacgagtatgaggccaggtgcatgcctgtaatctcaacactttaagaggccgaggcagacggatctcttgagcccaggagttggagaccaacctggacaatgtagcaaaacaccattgctacaaaaaatacagaaaaataattagccgggcatggtggcatgcacctgtagtcccaactattcgggaggctaaggtggggggatcacttgagcccggaaggttgagcctgcagtgagccaagatcatgccactgcagtccagcctgggtgacagagtaaggctgtcaaaataaataaataaatagaataaaaaattaaaaaaagagtatgtagaaaagatcattccttttagatctgaattatctcatacgactatgtttattgtttaaaaaataatcttagagattcacttcttggtcactaaaatattcaaatctatatgcttgcagcagaataaaaatctgtctgatttagtctttagttctgctgacttgctgtgaatacagcacaaatatgagacatccccatatttatcatagcaaattgggatgaaccaggtttttagtttgtaaggttttctctgatcaaaatagaaaatgccagaagctgagaattgtaatctataaaatatgaggttcatttgttatatggggaaaccttgttattttttcctaatcttaagcatacagtgtaattgtattttaataaatctccttgaaaaagcatttaaattataggtccttaaattcttctcctttttaaacagtgtacccatattatctatgtctcatatttttacttcttcagaaaagcatctgagaccactatattttaattatagtaatgaaatatgatcatttttcatcatcacttagcaaagatttacaagctgagtgagtgcatatgatagtttctgcatacctctaaggaaccagggcagttcttttccacatattaatttcagctattctttagccctcccacgtccaatacaaaacatgcaatcgcgtaagtgctgttcagttttttcattttaatattgtgccaacaactgcaatttttcttcactcaacacagtttctcattaaatcttaagcctaatccagtagtaaaaacgtgctatattttaaaaatcttgaagtgaaacatttgttactcttctgataattattaaagccccaagccatcctctgagctaattgtctagtggatcattcttgccttctagttctaagaaattacaccttttttttttttgtaattaggatcttttaggtaagttatttaaattattactggatcttatcagaaagaaaatctttgacatctatgattttgataacttccccctcctttgagatggtgactttattcacatattaaagcaagccagaaccttgagggaagaattggagagtatattttacatccaaaatacttcaaacctttctcgttacatgaaactgtttttatttttttaaatcctgtatgtaaaatatgtatagcattaaaaataatcactagtcagaatttaaacaaagacataatatactaggtcttatgataatacattgttcactagaccacttgaatagaaacagaagacataaaaatattgcattggctcatcatggtcctgtctatgaagccagttcatagtttccatatggtctatctgtctagagctaagcattgctgaagcatgagccacatcattgaaaatcagctttatccctgactaaagacatgactcagaaacaccacaagcatggaagtttccaagtagtctctctggtcacctaatctgctgttgtcttcttgggagttgaagtagaagatgttacagcaaatctcttttgtctctctgcttagaacaaggtgtttcgaatggattaaacatattaacagtgaaaaacttctctgaggagaggtttccggattgcttggacctcctcctggggactgtgtgggaatttcagtggtagttctcatcttttatattttgtttctctacagtaatttaaaatttattctgtggaaaaaatagttactattccagattataaaaagatgagaaaagaatcattccattttgtaccctctgatgctttatgtagtcctgtggttcaaagaaacaagacacatgaaatcaaacatgaaattgtccagatttcctcttgcatcttttctctattcttgtgtatctgttcttctgaacagtttcagtggagaactactttggaagatgttgatgtgattttttttaatctaaaaattattttatatcaggctgtgcttataagtccaacatgttgtccagtggacagatgtgccttcatctggaggggattagagttttaaactaccaattttggtgaacagtcttatgtcctttcacttcaactctctggacaatatatttatttataacatgaagttaatatgttctccaaatttcttcccagggagtcagtgaaattaaatgagttcatttctgctaaagtacttttaactctggggaagcaaaatttatttttccttataataaaaagtaaatggtagtattacattctctcagtagacattggaaaaatatatacacctgttttaacagactgtgttatcatgtttaatttctttttttttttttttttttttttgagatggagtttcatgctcttgttgcccaggctggagtgcaatggtgcagtctcagctcactgaaacctctgcctcccaggttcaagcgattctcctgcttcagcctcccaagtagctgggattacagacatgcaccaccatgcccagctgattttttgtatttagtagcgacagggtttcaccacgttggtcaggctggcctcaaactcctgacttcaggtgatccacctgccttggcctcccaaagtgctgggattacaggcatgagccaccatgcctggcccatgtttaatttctaattctttattttacttaagagtagcagttttatttggtttgttgggaccaccaactatctttataacttttctttgacagatcgtttaatatttctgatcattagtttccttataatgcaaaaacaacaaaaaacaaactaaatttggaaagatggaaggtatctgtaaacatagacttttataattttgtataatgaatgtttatgaagccatgtagggccttattatattatacattattataagagacaggtatgaaaaacataactatgggagacaaaatcacagcaaatataatactttaagtttgatagataaaatatttatcaaacgtatttgataatatatataatgtaaatgaaatatttatcaaattatgcctgaggtcgcaatttttttaatttttgcaatcagaccttggcaatgaccttgagcagtagggtattaaaatcttccacaggcttagcgtcccaataatggaacactaagcataaatggattaacatttgtttatagaacagctatttgccaggcactttttaaaacacagagaaaatataaggaatggtgtctgatctctgggaactcagtctgttaaagaaaatgaaattgctaaaatagaaaatcaatgagtgaatatatgccaaatggtacaatgctgactattaaggtaatacaaatttaaagaagggaaagaaaagactgaaataagttagagaagactttttaaatataatcatcatttatagagtctttcctttataccaggaaggcattgtggttgtaggaattctttctctgagacacggtaacatgcagcttaattctaggaagtaaaacaaacaaatgaacaaaataaaagaactaagttaaacagtggagccacttaatgacctctgaaggtcaggcagaggactttgggtattgtaatagctaacagggagccatagtaacatctggagcagaagagtggcaccatagacatagcagatgtttagggaagcgagtcttccttacaggctagaagaagtctggggactaagtaagatggaaagagaaagtcaaagacatcaaaggcactagctaaggttaacattttataaaatactgacataatgatgctgatgatagtaacttttataatatgtattagtagctgaattaatataattaaacaagggggcaacggtacaaactcacagttgtgtcctgcagtctcatcatcatggctgcagaaagagaaatttggaaaaaataaacaggactgggttagaacttccagtctataagaacacacttttgttgtatttgtagtatttgttgtatttgtagtattgctgctaacaccaataccagcctagaagagttctttctttagaatcagtgttacacttgcctgtggtacttctctgttcttgaatattgtaacatttaacagatatagacagcatttgtgagagcaagtggtgggactcatgtggatctagatagtgcgctcttcagacgactgtgtcctctatttctttcatgtcctcatatatctagaatcctactatgtgcttatgaggaatttattaactcatttagacttttaactcactgaagtagggttgaagaaaattctttagtttttataggattcagtttaggtgtagttttacctaaaatcaggtgcattgtctaagtgttctgaatagcttcattcctcacttataaaaatcagttgagcagccatgtacatttattgaactcatatgagacaggctctgtgctcatgctacagacaaagtagtgaacaaaaccatactggtctttgcctgatggagtctgtaggctactgcaagtaacaatcatgtttcatgtaattaattgaattataaatcacaggtttgccaagtgctatgaaggatattaattgagctaagggaatgtacaatgaaagacctagtcagaggctgactctgctctgtggaaaaaagaataaaaaaagagtatgcagtcatactcttcagatgtatatagagtcaatttaaaatatttcattgtgtatatataccacattttcttaatccattcatctgttggtgaacacttaagttgattttataagttggctattgtgaatagtagatttttttataacttggctattgtgaatagtggattttataacttggctattgtgaatagtggatgaatattttagctagattgatttaattattcaacgttgtattcataaatcataacatcattttctaccccataaatgtatacaagtacaaattgtcaatttacaggaaaacgaatacacaattttgaaatatttatattgaatgatttaaggaaaaagtgaatatttagatgttttatcacagaatgaggctggtgaagtggataaggctataaagcccctcagaacccctaagctgtttgacgagacagggaaacttcctcaagagaggaaaaccaaaccacaaattagcagtcgatatgtcattgtgtcacaatgacgtggagatgtatgggatgtagattgatcccacatccaatgaaattgtttgacccccaacttaaggattcatcatgtagagtaaacatgggcaagggttttagtctttctgcagatgagcatttcagagcaagctgtgcaaacagagatttaggaagggcaccaaggttcaaacaagaagttaattcacaaacaccgccaccctcattattgggattatatgtcctggacattgaaaaacaacatttgaaaaggcaggacaagttaggtttggtttggttttgtttttttctcagcatttacccatgagtctagtgtggccactctatgtatcctcttatctcatggattggaaactagtccccagattgtcattaaaaaaaaaatggaggatatatactgtctgaacagtggtggtgagatataggttggatctgaaggaaacattactggaacattttatatttaatattttctttaatgatgttaaagaaggcattcccttggggaaataaatgtcttttgcagatgatgctagaaagaacgctaaaacacaaattagaaaagcatatgcaaacctcaagaaacttcacttaaaggtagataacagaatgaggttcatcttggaaaaatgcagactaatagtaacaatacctttgggaaagaataatctacaacacagatactcagccagtgagtgggcgagttctgggcagaatgctgagctggctaagaggtgagaaaagtcaatgtttgcaacacgatactgtaggaaaacagaccagcatagttggagctggcgtagacactgccacctcgagtttacacagagagagagcaaaggctttggtgtctgatactttctcaccaatattccttgatagagatttgttgatatttctatcatttaatatttgtaaacataggcatcaaataatttcaaataccacagctagtattgaggaaaagcagacagataatagggacttttcatttttcgacaaggtattttttaaattgtccaaatatttcactgtggaatgatgactagagagagaggaaatatcagctgtatttttttttcttcctcttgttcctgatcaagggagggtttgatgaaaatgaagctgagaagagaaaggatgtctaaggatggtttataaattgaccataaatgtgtggtttataaaattagccaaccctaactagaagtttcttggggtccgtgaatatctataaaaacgtctagaatctccaccaagaaaaaatggaaaataatttattcaattggaatataaaaaatacaccaagcattaagtttatttcaaaatacatacatctatgattgattacatagtaagcatatcaggatattaacagtatattgaagttattattaaccacagtttttattatactggtgctgggcagaagtttggttagtagaatgcactgctttattgaatctgaagtaaactggtatttcactaatagtatttaaattcaagataacagacttacttttaaagaatcaaagaatcttttccaaattgcaaacatgatgttaaaggattttattggagggagggagactgtgagaaggatactgggaatttctgtaaaaattatttgagggcaggcacagcagctcatgcctgtaatcccagcactttgcgaggccaaggcgggtggatcacctgaggttcaggagtttgagaccagcctgaccaacatggcaaaaccccgtctctactgaaaatacaaaaattagctgggcatggtggtgcatgcctgtaatctcagctacttgggagactgaggcaggagaattgcttgaatctgggaggtagagattgcaatgagctgagatcttgccactgtactccagcctgggtgacagagcgagactccgtctcaaaaaataaaaaaaaaattatctgggagtccacagaggagagtgtatcataaactataaaaataacagacagatgttcaagattgacctgtgcttgcaaatcaattaactgtatgacaatcttcctttttttttttttttttttgagatggagtctcgttctgtcacccaggctggtatgtagtgttgtggtctctgctcactacaacctccgccttctgggttcaagcgattctcctgcctcagcctcccaagtagctgggattacaggcgcccaccaccacgcccaaccagtttttttatttttgatagagccattcaccatgttggccaggcttgtcctgaactcctggcctcaagtgatcagcccaccttggcttcccaaagtgctgggattacgggtcttagccaccacacctggcctgaaagtctcctttgatacaattgtggatcagatacggacgctgtggtctgatcttaagttcattttcacggacattttgtgagagcctattatgagccaggcattgtgctaggcattagagatacaaaatgatcagaatgtgatcattgtctgacagaatgtgatcagtgtgtcacagatcatcacaatacagataagtgcagtgaaagaggtcaggatagggtgcaatacaaaaggcaaggagagaattctccccagagcatagaagtgggtgatggggaggtggaggacagggaaagagtgatgcctaagttcagaaaaaactgtgaattttcaccccattaataacaaatatagaacaaacatgatcatgttaagagcaaatactaaaatttttaaaaaccctgatttccatcttctaatctgattaatgaaacgaatggtatatacatacacacacacacacacacacatatgtatatatatttaaagctacaacaagtacttgttattcagatccttagattgttctcagacataaaattcttggaatttgctcaaactcatgccaaagcttatttttcaaactcaggtttgatttactgttattcttatcttccaggaaagtgatggattgaatgtttaacatacaatgttgataatagaaatgtatcagaagccagtctccctagtctgttagaagtaattccacagaatttcacagagcttatagatcaactgggttttcatttgcatgtgctttctctacacaatcaatgcagtgtgcagtttgcatatgcagaaactatctcagtttctgcttttcccttccatctcatttggcaacaaatttagatgtctctgaaggctacatccttttgttgctgaacacttgagttgcttgggcacttgcagtttgttttacctcaacgattgtcttaaaaatccattttatcaagaaggatttttagaagtcattgagttctgtcgtccctgactggtaatgcattcagaagaaatgatgttggggttttctagcagtgattccatgtgttagaataagtatcatttcccagaaccttagtgggaaaagaggtctttgataatcacttaattacattccttcattttatcactgaggaaaatgagaccccgtaaagcaaaatagcgtgtccatgtgcaaacagcaagataccacagtgccgagagagggcgtttgcctcccttttcccagttcagggcaccttacgtcttgaactttaatctacatccacatctcttagggatcttgttaaaatgaagcttcttattccatagttctcggctgtggcctgcgtttacactagcacactcctaggaaatgctgatgctgtcagttctaagtaataacagggtcttataacactaagaaacaatgctgagaaaattcatctcccaaatgaagacaaacactagcaaaaggatagttctggttgagaggtagctgctatttccaaaaaatgactttcatacctcaagtagttctggtgttagtgcacccagttttccgtatgattttatgatagagataagccatcatcttatgctagcttcctaggaaacatcatgttagaaattcatagcagttagaaaattgattgggtaggatttctgactccctttacctagttgtcttgtgccttctgatcacagaactggttataagatgcctaatgacaatttccttataaatgccttccttctcttaaggaactcgtgattccttagctatttgttaatttaatgattcttactaacgtaagggcatttcctgccttgagcaattgtgtggtgtgtgtgtgtgtctctcttacacatacacagcgtgttcacatatcttatactatgttcttttgtaagaaacaaatggattatttgtgctcagtatgagaattttaacttttatcaagaattcaaagaagcaggatggaatgataattactgaatacatcattaattctggaaacacctgctttaattatagggtttgtctatatgaacttatagtcctggtagagaaacaaataaaaaccctatttacttcagaaataattttgtcaaataagttatatgaaaaaagttcccatgtgttttttcttatatacgttcagtaagaatgtgaagacattcttattgaagcatatgaaatggcgtctttttgagaaatgacccaacctcttttttttttttttttttttttgagacagagtcttgctcttgtctcccaggctggagtgcaatggcacgatctcagcttactgcaacctctgcctcccgggttcaagtgattctcctgcctcagcctcctgagtagctgggattacaggcgcccgccaccacacccagctatttttcatatttttagtagagacagggtttcgccatgttggccaggctggtctcaaacacctgaccttgttgtgatcttcccacctcagcctcccaaagtgctaggattacaggcatgagccactgcgcccggccaagcttatacttcttattgacatgtttctcaaggtagctcttcctctattccctgcagcaaaaatattctaaacaaaaataatccgtttacttatatgaaggtgtttccaagagtttgaaagagctgtgtcaatataagatgtttgttgtttaagcttaaacacatactcacagggcaaaaaatctgaaactgctagtattttatcgcgcaggctattttcataaagtaggagaattacatataccaagtcacttggtgaattggtttgaagggaaatgaaattacccctatattggtaacaaggaacagttttgttcatatctctttgatgccaaaaatatagtatgtattcttatttactctgtagtgaaaagggttgtgtaaaaatcactagggatgagctaccagagctaacttggataggctctttgcttgatggttgctgtatagatgaactattaataataattatgatgatggatgttgaggattcaaaatgatggtctttctatctgtaagtatattgcttcctagaacctttcagtggccctttttattagaggatatactggtaaaatcaatcctacttaaaatgctttagttattagagtaacagcaacagcaacaacaaaaaagtggtaattataaagagcttccatatttaagcacagccccattgcatgaccttaagaacaatattatatcaagattctagaattttgatagttaaatatatgtgagtgaataacatgaaaaatgttatacagttttaaaaatagtttttccttaaatgcaaaatgacatgtattaagtaattctgcataagaataactgatctaaattttaaaatgtatttgtctttgatttgggataatgcaattaagtgaaatttgtcttgataaaaatctgcttctagtatctttgaacattaaaaacaagagtttatttgtaatgtctttttaaaaaacagggaatgtagtttttcttgtcaataatcattatagtgtgaaagtacttgacttctattgtttaatgacttaacttgtaacataaaacacccatgaaataaatacacaattgaaataagtatataaaagaaaaagctcaagatcatttattgataagagacagggatggaatcatgttagcgcttatcaaaaccagtgtttcaacatagtgagaatcaatgatcagtggcaaatagggtcatgccaaagggaaattgacagctctccgggccatgctgcctcttattccacatttcaacttcactctagttaaatttcagttaaccaatcatttgaagactgaagcaaacaacaacaaaaatctgtaacccacagttttcgtgggacatggttttctaaatgttgtgtcttttcttttctttatattgcttggtaccagatcatttttaggaatctccatattccataggaggaaaattgccagtctgaaagctcagtgtctttagcattttttttttgcttaccacatttttgccctctaggtgccaacctggattcactggagcaagatgtactgagaatgtgcccatgaaagtccaaaaccaagaaagtatgtcaaaataatctgaaatttgctttctcccccaactacagcaacaatcactaccacttggtgcttttacagctcagtcgtaactgattcattttgttctaattatggcttaacctctcaaggcataaacccattcagtgttaccttatttaactgtctctcaaagtgggtccctaagtcatcaatttacaagaatggccagtcacgatggcccgtgatgctgacaaactattgcaggcaagccaaccgagaaacattttcttccaacgtgtgtgaccaaagccatcatatggaaaactgagatgaataaaacatcggatttcattttaaggggttccctttgaaagaaggcaaccacttaaagtgctgggatctttccaccataccaacttaagaactgcattctgtccaaatttttaaccatttgggggaagtgccagagcctgaaagccatgatcagggcaaagattcagttcctgagggtgaactcaccaagtttcagtcaaatgacactgaaggagcttctttctagcatatattcacctcttctctttttctctgtttttctaccattgtttttttgtttcttctctcaggtgcccaaatgagtttactggtgatcgctgccaaaactacgtaatggccagcttctacagtacgtccactccctttctgtctctgcctgaataggagcatgctcagttggtgctgctttcttgttgctgcatctcccctcagattccacctagagctagatgtgtcttaccagatctaatattgactgcctctgcctgtcgcatgagaacattaacaaaagcaattgtattacttcctctgttcgcgactagttggctctgagatactaataggtgtgtgaggctccggatgtttctggaattgatattgaatgatgtgatacaaattgatagtcaatatcaagcagtgaaatatgataataaaggcatttcaaagtctcacttttattgataaaataaaaatcattctactgaacagtccatcttctttatacaatgaccacatcctgaaaagggtgttgctaagctgtaaccgatatgcacttgaaatgatggtaagttaattttgattcagaatgtgttatttgtcacaaataaacataataaaaggagttcagatgtttttcttcattaaccaaacagtttgcattgaggcatttttttaaaaaagcatcaagtaggaaaattaaaaacaaacatttcacagcaaatgagatatcctggcttctgtttacgttgcttagggaacaagtaattcaggcactagtttaaacaattatttatttatgttaccatttctttatgttagtttcaaaagtaacttagaataaaatagttactgttatttgtttaaatatttattttgagatataacaactcaactataggataaatatgtgtttgtatatatatatgtgtgtgcgtgtatatacatatatatataaaacttaaggcaaaacatatatatatatatatatatataaaacttaataacttaaggcaaaactgggaagtttggatagatgttcgtggcttcctgaagttttgaacatcattcctaaaagacccaattcacattgtacataattatataaaccaaaccatgtatttgtcctattgtgaactggacacatataacttctgatcctggagctttcaaaatattgcatttaaaatgcatatcatgtagttatccttgtagatgaaagaatggcaatttttttctgtaaaggttcagagagcaaatattttaggatttgtggtgacaccatcactgtcacaacaactcaaacctactattgtagcatgaaaacagctgtaaacaatgcataaaactgatgtgcatgggtgtgttccattaaatctttatttacaaaagcagacagtgggctggatttgtcaaccactgatttagattgtcaattgctcaccccgaaaaatatgtcacatagcttactgcagtttaaattcacctaacataagaaacagtgatgtaagttggttatttaggggtcctaaaagaatcagatttacccttgttctgatgcatgcagagaataagtttctgtaattcctgttaacatagaagtttccagaataaattctataatgtataatgttaagattagacccgtaatgtgcaatcatttatttagggaggtagtatttatttatttacataggctacatatcaaagacaacttcgtaggccattttctgttgtgaaaaattagtaaattggcattgcaaaatttccaaacagccttcactttattcacaaacatttaagtaatatgcatttagtagggagaatttttctatccacagctaaagcaaatagcttgatttaatttttaagttaattttttaaagctaggatagaaaataaaaataaaagggaaaaatagaatgttatttaataccttaaagcatttctcttagaaatgtgtatttgtatttaaataacatagactcagcaaatccatgtggctagataaatgcagtaaaatcatattttagactttaatgacaattctgatcacttaattaagttacacttacatttttggtgttaagagttttactgtgctttgaaggcaatgttcaggcactatataaataaaagcattaaaaatgaagctatttcccagcataattatgtagttagatctgacagtagtaaccagagaaaatattttcaacttctcttttagaccatttgctttttcagaagatatcattttaaaataaccactatgtttttgtgaagttcagagtgtgattccttaaataacttctttagtatgctttcaatgccacttttggacgacatccaggaaagcagcattcatatttaacctgatttaacaaagattgattgcacatttatgaacaatatatgtaatggctgtgcaacagagatgcctcatgtctggaaaagcaagagcttccaatcagaaattgctttccagtgttgtcttaccgagagttttttcaatttttatctctgcaaacccctacatagaagtcagaaaaataaatttgtgctgctctaagaactttatgttcaagtagcagtgaaagccagaataaagatagagaatgtcaccatagtgaccgttttaaaatttaattgtttgtagtcttaaagtctggaaaacataaattttgaacacaaactaggaaaagatagtccccagcttcaaagagaaacattcaaaacttaccaaactgcattttcagttgaaaaataacattctaaagaatagataattttttaagtttattaacataaaacttacattattcagacttgatacagtgattctggtcagaatgtccaatgagccatttactgatttataaaaactgacttaaaatatgaaagagagggacaaatgtatattttataaggcagtcatttgccttgaaataaaacattatatttatagtactttctaggaaaatattgtcaaggttagtcagcttcaaatttgacctaacttgacacagaattcctagttgaaaaaaattgtgttcatcgatatgtggtgtgtggggggtgtgtgtgtgttcgtgtgtgtgtccacacgtatgtgtgtgtatacaggcactccataatcaatgtacagattttagggaggaaaaaagaaaaagcacccacactttcaatagttaggggcagtacagagcaggtatgtcatatataaactaacataataggacctaattatagaatagctcaaatttagaatattttaaaagattgtaattttagaacttttaggaatattctcacactgagtaaatttagcagatatccttaaaagtagttttgaatcacaggttactagtgcatccatcatttgcatggatttctaaatgcaacctgttgaaattattcttgttcatcaaacatgtatcttgctaaaagtagaatagaggaacacttcacctgtgacaaaattgccataaattccagccaagtgttagtgagattttactgtgtgtgtgtttgtgagtgtgcttatgtgcacatggaatttgaaacttaaggagaaagtctccgttaacatttcaaagggcccagtgacactacggattggcatatgtgaaaaaaaacagtatctccattttataaaggtaagtctaaaattaaaagacagacactaaattggtcctgtttagaattggcattgacagaactcctttcgaaatctcagcggtacagaaagtcaagactttaagattttaagtctttgaaatgattagcataaacaggcccaagatgttaaagagaaaaatcctaaatgtcttcaaattttaacaggaaccacaattgcatggatatataatttttgtaaaagaaagttgttctattgttctttcctttaatgcaattgaaaatttaaattaacctacaggttaatcagttttcctcaagcaattataaaatcctaagacaaaggattcgtgagtcaatatttaatagtttctgaagacttttagatttaaattaattttttatattgctcagagcacagcaggaaatcacatgtagaaaaggaaactagattgtttacagtaaactttgtgtttttgaattattaatttaatttgaaaaatgtagtggctaggcagaagttcaataggaagcatgtgattcttaatgagtccaggccaacattagattaagtagaacagatagaaagtaataaccttttcataaaatgaaaagtgttcgtgtattctgctttttttttttttttttgacttacaatgaaagaaatgtagctaccaatagtaaaaatgaattagagcattatttgctctgggtctagtatgactgatgcatgttccctctgcttgtttccttgttagggcttatggccagaagagattccagttttaagtaccaatttcccattgaattatttgaaattggagctgcctgatatgaatgacttcccgtgaaatgaaattatagttaggctgacagacttacctataaaactgtaaatgcagtaatatgtatgcatgggcatgctactaattttattgaagacttaaccaagctttctatgcaactaatatagatcatgagcagtgttcatgtaggcatggagtcctgactctctggaaagagtttctgtagacatcgcttgattttaacccttaaattattactgactggtaggagaaaaaggcaagggaagggagggggctctagaaagaaaatctgggtcccaccttcatggaaatgagtaaggaaatttattattgacttccttggaaaatgaatgttttcacgtggatgttccaaagtttgtattaagaaagcaaatgggaaaaaaaatgaccaatttttgaccaattgagtgttgcacggaggcaagagaaatttatctggatttgaataaattattttgctgtgaatattgtgcaaccaagttaatcgtaactaaatcccctagcttttaatttatgaaaaatatagcttatttgcttgtgtacactggacccaaggcagaggaaattattatatatagtgcttcccattatccttgttatgcaatgtactttttgatatatgtgtttgtgtgcatatatgtgtgtgtgtatatatatatatatatatatatatactttaaaaaatctggggagctttatttccttaaagggcagcaagtttttaagttttcaagtatccccggagcttacagagtttttctggctagttaacgagaatacagtaaatggcccagggtacatctcttgatgtgtctgctacccaagctgttaaacccttctgctgtttgccaacatatttcacgtctcctttactccccaggcatgcccagtgaggcatgtgtttgcataagaaatattttgttaatgaaaaattaacatgtccaaagtcactaaaaagttccacggcagaggcaggacccaaaaccaagatgattccagcacactcatctcctgctttttccctctctatatgaggtactttttccatgcccaaatgcaagtttttgtaagagaaacacccctccacagcattttcttcacacttaagagataccttgccatatcattgaatagcccttgtatctctcgaggcagtgatcaaagaaagaaaatatagatctccattgatatgctgtctctccttccaacctgcttcttgaccacacacataggcgcatgtacacgcgcgcgcgcgcacacacacacacacacacagagagagagagagagagagagagagagagagagagagataaaggaagtcctagagccttccgcatcatgaaatttgattatcagttttggttttgagaatgaaaagtgtcatccctggagattttttattttttttatttttttggggggcttgttttcccccacttcctcaatggagcctctgcaggttctgctgttcttgcaatcctggagtctctggagtcccagctgccaggattgctggctcttggctcatacctttgagtccacttccctgggcagccctgcaggtcctccaagtggctgtgtgcatgggagtccagcattctggagaagtgatttcactggctctctgtgatttaaaggagtaataagatgaaaaaccctaggaattggatctttcccacttatttttttccttacagtttgaaaaaagtgaggcgtagaattgtcctatgccatacagaacttatatgagaaaaactagaaggagtctccagtgtcccaagcccctgtttggggttttggggcagaagcatttgttgctttctgtgaatgaaacagacaagtgatgaggaaagtggaagattagaagaagtaaaagagatacagctaagaaaataattagataaccaatgagcaagaagtatttgaggccagctacccacaatcaaaaatccaagtccaacctgataacattttcagaccaaattaccatcctcttggcttctgctcctgcctctgccaatgggtgtctttgggtaaaaattaattaattaattaatttaattaaataaaattcacctccttggaactttgcttctgccttttaaaaaaaggaatgaaatagtatcaaatgccttttctgattataaagataatctttccattcccacacaaggaaataatttaggggatagttcagcgacagaacttctccctcagtaaggtcttttaagggttaataaagacacagtgtgctggtattttgcacacctcataaaaagagacgttccctatgtgaactcacagaggcgtacctgagcactgcttcttaaccacacaccatttgtctggttcaatgtgcatgcacagagagccataatagtcatgtgtaatgtgttttggagtgcagtgtattgctcttttctgaaactttttccctttctttcttttttttgtcaactttctgcattggcagagcatcttgggattgaatttatgggtatggaccaatcatcattccttttagcctgcagaatttagagcctatgagctgaaatctttttcccttcctactcttacctttcagttcctaactaatttcctttttctttagaagggatcatacagctataacaatgatttctctgccttcaatctatgattagtttactgaaatgttactgagtgcagcaggttttagattcctaagcatccttcacttagagtttaaaagtaccctacctgctgcaaattcacatatatcccacgctgcttaacccactgattggatctagctctgctgttatataaaagctggggtaagtagtagtagcacataaaggatacaggggaaatccactcagagacctgagaacaaaggctttttaaatccatctgcttaaaaaacacacagcatcttagcctggtaggatttttggcatacaatgtaaaaatcatctatttaatataagcaatgtaatgtatatagaaagcccttacgttacaacacaatattaaatgcacagacttgaattactcagattttctggagatactcaagcaccaccctagtcaacttcattatcttataagaaggaaatagaaaacagaaagaaagcagccttgtgctattttaggtggagattccagtggtaatggaattaaatttgagtcatgaagattatccagacaagtaatcaaatagaaaatttcacactgtcaaagtaaaagaaaaatatatgagtatacaaaatttggacacacttttttgtaaggccttcatcctacatagttgggattgaagaccagtctctggggagtaaggagctgtgctaccttcccagagactccacagggccaggccagtcagtctttttcaatgctgcctgcagtcccggaccatggttgggtcagtgacacaatgtcctgattcacagaatatctggtccccatccagctggcttcagggacatcatgcagcaggggcatcctacagctgctgccttcttttggatgataacatcacaggctggacataatgtagtttccagactttgcgggaaatgaggcagttgcaagctctagcagctacagggattgctcaatgggttgcccatttcttcctcaaaaaaaaaaaaaaaaaaaatcaggagtaaactaccaatttgatgagaagcccccaggtgcacgtgaatgggcctttgtgcctcgcagaacatctccaaagagggagaaacacaagggggagcacctctattactagggagcacgttgtgtactgaggggagctatctattggagtttcttccctcagggaaaaaaaaaattgtcccacttatgaaatggattattggcctatcctgcagggagggaaaaaattctaccattaccccaaacccttctatccttaacagcatatttctcatttttatagctggagggtctgactatagaatgtattgtttctgtccccaacagtaaagtgaaagacagttgagatatataacttccccctcagtaagatcttctatgggttagaaaagacacagggggctgctatccgcatgcttctcaaaggtacagtttccagaggctcatagttccaggcttgccggtgtactaaaccagaacattgcatccttcaggaaaatcagaccttaaaggtcaagtacaactcagaaaggtaagggctctgtttcttggccaggccagatcagactgaaaaatgtgcttgatctggaaacatgttagtccagccaaaccatgaagactctggggcatttgtgctcattgagagacagacccaccgatcggaatgacagactcttgtttttagccctgtctgtctctaatttgctcttccccagttgacctgacacataagaaaaaaattaatatggggaaaaaagaggttaaagaatccattgtttgtattatttttcaccaagtatttttccttgatcacattcatagtgtgggatcacctgattgagccaaaccatgaaaaattcaaatagcaatgaggataagggttgtagtgcatctggtcaatgctgatgtgaatataagattttaatcccacgtctgtattctatgggccttcgcttgaatcagctcattctagtgctgttacattaccctttggcctttactgagctacctctttatttccatgaaatgatcattttactggaaaatgtgtgtcttcctacactgcatagaaagaatgcacccgtcatcatgcaccatatgtttccaaacgcagctcaatctattcttctgtaattaacaacaaccaaaagacaacttgtcccaagaatccctgagagtatgcatgattcctttttcccatttagcccttgtccatgtccccatttttgaagtctgcagaagcagtttcctagcttctttctaaagataggatgttaagatgtcagtagacaagaataaccacagacttgcccatcttcaaagaagaaaacaatagaggacggaaaagaggacaatcatacagggccttcatctcttgtcaataatacctacactcctatttcttcaccaactcatcacagcccagggagctgtgctctgcatcctgggtcccagggagagaaggaccagtggggtgacagctttgcttcttagacatgtatcctaaaacctgatcaggataccaagatcaggaagagaggctacagcagcagcttcaaccagataacaccccatagaaattaattccctgtcctgtggctatgggggaggggaggcagcagacatatgcaattaacatataagcactcacattccatgtcctcatctgacttttgctgcacacaaaatccgtgataccaactcaatatctcctggtacattgtttcaccgcaatgcaccagccgcttcgctttctaattgtggcttccacatgactgctagattaggagttatgctgtatggaatgacccttccaactttgcatccaccttttcttcccacccaagcatttcctccctctggttttcttttctttctttatttttcctcccttagtatcaggcatgctgtgccagggacttcagatggctccttaacttttaaccttgttttcccttcctcggtctctctgtcattctgtcagtctgtctgtcctcttggtttgtttttcctttccacctccaacccttttgatttgtttttgtatactctatgcagcattctagtcctttacccactgacttctcttttccttctcctcctgttaataatcagtgctatattaatttgatttgacaatgttcttgacctgtttactggaatttgattatcatgggctcggcttgtaggaaatgttttgtttcatgataaggtccactgtatcctagaaattaaaattcactttttcatttcaagaaaacttcctgcaagctgccctctctcaaaagagaaaaaggtgtagttaaaggtgtagttgtgccactgcagatataatatggaaatatgctttgaggttcccttgttgatgtccagaatagtcagctctgtttgtacagtattccccagttcttgaccaatttattgatcataatggcaagtgaacagcttacactgcttatttcataccagttgagttctctttctgagtgaacttgtgaagatcttccaataaatgtaattagactcactggaagctcaggtccttagggatcagagtccctattaaatcagcaaatcttgttaagaacctgacctaccttagtataatcaacttatcccccaaagaaactaactcgcaaatagaaaaacttctatgaattagagactgatcgcattttgggtgcagtagtatctttggttcaaagttctaagtgtcacatttccttagtataatctacattagctcatttgccaagttggccaacgtaggaatgtgcactctattccaaatcacacatcatttgtactggtgacttctttggacaaataaaacttgttcctaagtacaattggtggagtagttagaattgtcttccaaaggacaagtcaccatttgggcccataactgtcctacccatcacataggattttctttgatacagtgccctgctacctcatattgtattgcttcttgtgttcacattttactgttaaatcacagagagcctgactcaatttactagttaactacaagccaagttcatgtttgcaaatgtctttgaatttaatatatttaagttagaaatgactctttgtaaagaccactggatataaagtgatgatataaaatatctgggaaatacaaaaaggccaggggctgggggataaagaggggaggaaggaggaagtggggggcgcccagtgatgccaattccatctcctttaattggtgttgattcctgttgtctttgcaagagctttttatattttattttgcaagagactacaaaaaaaaataaaactacagagttttaaccaaatagttattttataattaatgtttatgatttccaatttactatcaactatatatatctctatagcttataattagaagtaatttctgagtataatatttgtattgtaaatggccccagctggcttttttatatttatgttcaaagcatagtgcagagcatgttgtaccttagctatgtgtgtaaacgtaaagaattgtcatgtatttattttcttgtgaacatggacaatgtcatgcagcatgcccactgtttggttgtagtcagtcctggcaagtggaagtgacctgtgatgacatctgctctcatccctttccagaggcggaggagctgtaccagaagagagtgctgaccataaccggcatctgcatcgccctccttgtggtcggcatcatgtgtgtggtggcctactgcaaaaccaagtaaaccttctttctccatgcctttctctctccttcatgcagagacagcttagatggccagggctttgcagaatctgagctccacagcctagtcttggggataaaaaaaaaaggaggggcagggggagattatttcctctgaataatccattttgaggatgtctcctaaacacagaaatagaaagctgtttgcctattcatgtaaagatttctgttcaatgaccacagcccctgagtggataaaggcctggagggacaggcttgtatggaaggtatgtgtgtgggtgggacagaatgaaggcacctcattctaaaaggagagggagggtaccagaagtccatttgagggctttagtataattaagttatccccaaaagaaactaacttgcacctagaaaaacttctatgagttagagactgactgcattcagggtgcagtagtaccttcagttcaaaggactactgagaacaaatccaatttacactgaaaattacgagataaaggaaacctttcgtggtatctgaaatgcagttttctgagttatagtgattattattattatttttaaattctatctaattaggttgccagtatgaatgctctcacagcctgagatgtaaaaaaggaatctcaggggaggaaaatgaagcaaaactttctttgaaaacataagagagaaaacattagaatagatttgggttccctatgtttggtcttgaagtttggtccgtattaacaaattcaattactatgtgacatggattctcttcacttttctctcctacatataacttacatttcaagcctaatatgttaaattaacaaggtttttgaaaaaatgttgctgcacgatactctgttgccaaaccatccatgggaatatttcataatctgaatgttgcattgaggaagaaaaataatatgcttttatgccacaaaatccaaagcatggattgtattttgtcaatatcccatgatttagtgtgttgccagaattaagggatagagataagccttcctggagtcgacctggtgagtctcattagattccatctcaatattcgctgcctaattgcacaaaaagcgttaccagagtaggaacatgttacgattgtgccaaaatccgctggcaaaatatgtccacattctcacgcgtatacatgggatacactcacaaacatgctaactgtgtatattcaaaactcagttcattttcttaagagaccccaggaaaagctataaatgaaatcactcttataaattctacagcacattttttttttttagacagaatctggctctttcacccaggctagaatgcagtagcacaatctcagctcactgcaacctccccctccctggttcaagtgatgctcatgcctcagcctcccgagtagctgggacgacaggtgcacgccaccagcccggctaatttttgtattttttgtagagacaggacttctccatgttgcccaggctagtctcaaactcttggactcaattaattctcttgcctttgcctccgaaagtgctaagcttacaggaatgagccaccccacccagcccagcacaaattattatctaagacaaataagtgtccatttgtaagacttaggcaaagatggattgattaggaaatttgtgattttagtcaattatcaagttatttgtgttatcctatttttttcttgtctctcagtaaaacagctaaatttccataagaatcccaggtggcttttaaaatctgtttggtaaggatgtgtggtttcacttattctgggatacagtggacatactcccttccctcttcctcatcaccagtctactgccttgaactactcataggtgttggtagaataaagacttggctctactatgaaatgaaaataatcaaaaaaaaataaatgctccctttcttatgtccaggaaacagcggaaaaagctgcatgaccgtcttcggcagagccttcggtctgaacgaaacaatatgatgaacattgccaatgggcctcaccatcctaacccaccccccgagaatgtccagctggtgaatgtacgttgactctggccagtggaaaaaactgagcctctctcctttgttcagacgccttgaagtttattttcgaaagctcttaagcttttagctgctgccattaatcaccatggcttccaggaatccaggtttttgccaggagaaaataatgggaacatttttaaaagtggatttggttactgtaaaatcagcacatttcctcttataaagtgttcattaaggggttggaataatagtgttgggtttgttctgcaaggaggccatagctggggcttgcgtggagagagtggggagaaaacaaatttaatagtacgataatcaaaaagaatgttttcatatataacttggaaatacaggctactccattctgtaactgattagtacagataaccgagcaaagagctttagagttattttcttagggcaattcacagtgcctgatgatttactggttatgatttccaaaggattctgatttcctttagggcgtggaaaggtcaagtgacttatcaaacacccttctcagtagcaaaagaagagtgtcatgccagcttcttccctggccctttctaaatgatgtcaagccctccagatgaaatatatccataatcattaaaatatttttttcatactgtaccaaacactcagcattcagttttttaaatacaactagatcatagaatattaggttctggagagtttgaagatattatctttcaaatctctctttttctttttacagataagggccagagccgcaccatctcttggcttttggagtattgctctttatattccagcatcatccttcttattttcaaattattgctctgatgtatggtttttttaatacacaaagcttgaagcttatattgtagtaccattttctatcctatagaaaaaggcatattttgaatggaacagatatatcatagacccaactacagagttggtggttactaaactatcagcaagtcttgtagcaaaaaccttcaaaactttgttggagcaaggtgcttataggttaacacactctgttgccttttcaccctctaacagtgttcatcacaatgttctccacatttgataacgatattcactacaaaaggaactataatctgtcactctgcatgttataatatataaacggtagaatgactgcctagattacatttactgctcacattgtgcatctttgggctttaacttttctcaaccttatttcttcaatataaaaacagacctaaaaataatacctacttcagagactccttgtgagccttaaataaggtaatttgcataaaacacttagtctagtggcatttagtgagtgttcaataattgttaagtatttttttcattagattcactgagcttatgttgccttccaaaaagcaatagtgaaatggttcagggactggaagtaggtcactgtgtatcctttccttaaatcaagctagctgtacttcccaggaagatccacatggaatagcctttccactaagagaaccagctagagtttcaagcataattcaagctgtatatttttggatctccctgaatatatttagagcccgcagaccgtcagattataaagtgccttatttcatcaaagagtattcctttctattggttttcctattatttaactcaatttggtataaatactaacagcaattaaaacacaacttcaaaaaggggcctccctccctaatagaaacagtaaaaactactgtggtttgctgataaaaataaagtagactctgactaggcatggtggctcacacctgtaatgccagcactttgggaggcagaggtggacggatcacctgaggtcaggagtttaagaccagcctggccaacatggtgaaaccccatctctgctaaaaatacaaaaattagctgggcatggtggcatatgcctgtaatcccaactactcgggagggtgaggcaggagaattgcttgaaccgggaggtggaggttgcagtgagctgagattgcaccactgctctccagcctgggcaacagagtgagactccatctcaaaaaaaaaaaaaaaaaaaaaaaaaaaggagaagaaaagaaaagaaagaaagaagagagaaaagtagaatctacctgcattaaatagaaatgtcctccatatattatgtgctttgtcaagatgtgtgcattgacaacaattgttaagtcccttatcagtagccttgttagccctaccactgctaacaagttaaacatttcagtgacattagtagggcaacatgggcactaggaaatggaaggagaaaggtaggcccaacatatagagattctgaatatttttttctagtgctttgaaatttgaaactatacaaatcacctgtctgcttctatttcaaatagcatttagccttcttcaccttgcaataccatgaaacaaatgaatgttggatggatatttgtatggaattctagtcattaatttaaaataaaatagaagaaataggacttttgctgataaaatgtagttggaatgatgggccgtacattggatgcacatccagagagtatttttttttttaactctattcatctaatctaaaagccacagtagccaggacaggattttccacctggccattggggaaatggaatttattacaaatcagctgtacaaaaatagatttgtgtgtttctgacagtgttaacgtttttatttacatgacaatattagtgctttgattgacatgaatctacgtgaatcttcaagttgtgtctctttgtttatccagcaatacgtatctaaaaacgtcatctccagtgagcatattgttgagagagaagcagagacatccttttccaccagtcactatacttccacagcccatcactccactactgtcacccagactcctagccacaggtatgagaatttaaaaattccacggcttttctctcagaatgaattgttgcacattgccttttgatatccctgcctaagaaaggaggcagtgaaatggatggtctttgggcagcaacagattttgaaaatcaactggctttgcccttaattcctgcataaatttgaacctcaattaggtaactccacagggccgttgtttcccattcctgagattgtctttactcatgccctgctactcaccgaattgctacactgggacaagtctgtctttggctctgcaaaatacttagaagtcaatttctttcagtaattggattgccctgggaaatgcacatgagaattggttaaatagtggaaccctaaattctcaaatgccctggtgatccccacctgagtgcacttactctaccaagaccaacactagatctccaaatgtagctcatacaaggaaatgtttctttaatctaagccactcaagaacagagagattataattatatactgaggagtggcattcgaaaatatttattgaatgagtggacaagtgaatatactgtatccttacaaagccaatctgaatcaagatcctctctatagcaaattacctttgtggcgattctattcggagacaagtgatgttacagtgagctccgggtgcatcagtagtttgaaacatttgtcagaatccattcctttcatttccatttttttgcatataatttttgcacgaaatatctgattgtctctcccatttcctccgcagctggagcaacggacacactgaaagcatcctttccgaaagccactctgtaatcgtgatgtcatccgtagaaaacagtaggcacagcagcccaactgggggcccaagaggacgtcttaatggcacaggaggccctcgtgaatgtaacagcttcctcaggcatgccagagaaacccctgattcctaccgagactctcctcatagtgaaaggtaaaaccgaagggcaaagctactgcagaggagaaactcagtcagagaatccctgtgagcacctgcggtctcacctcaggaaatctactctaatcagaataaggggcggcagttacctgttctaggagtgctcctagttgatgaagtcatctctttgtttgacggaacttatttcttctgagcttctctcgtcgtcccagtgactgacaggcaacagactcttaaagagctgggatgctttgatgcggaaggtgcagcacatggagtttccagctctggccatgggctcagacccactcggggtctcagtgtcctcagttgtaacattagagagatggcatcaatgcttgataaggacccttctataattccaattgccagttatccaaactctgattcggtggtcgagctggcctcgtgttcttatctgctaaccctgtcttaccttccagcctcagttaagtcaaatcaagggctatgtcattgctgaatgtcatggggggcaactgcttgccctccaccctatagtatctattttatgaaattccaagaagggatgaataaataaatctcttggatgctgcgtctggcagtcttcacgggtggttttcaaagcagatactgccttcaagatggccctttattccagaatgttttggctttcctttggggagattgggttgggttgggggagttatagcaaaggtaaaatgaagaatggaggaaagtaaacaaagagatattaaatagtaatattgaattcatagattctctttctccattttcacctgagctggaagatgaccagtatttctagcccatcagtaagctgttacctgttcctatttgtttgcaagtctgctgggttttactttattttattgtcatctcaggctaatctttgaccatttactaaaaggtttacataatgtcaaatccatacttatgtggtagttacatgggaggagatgactttgatagagtctttccactcttggactgggaagttacttccaataaaataacacattctgggcttgaaggcctgttgcttacttttgcaagggcctttccttcaaaatgatattttagaactttgtggaatttatgaaatcagaggtaagctattacctgtttgtttgcaagtccgctgaattttattttattttattttattttattttattttattttattttattttattgtcatcttagtctaatccttgaccatttactaaaaggtttacataatgtcaaattcatacttgtgtggtagttccatgggtagggatgactttcatagactcttcccactcatggactggggagtacttacaataaaaaatgacaggctgggcacggtggctcacgcctctaatcccagcactttgggaggctgaggtgggtagatcacgaggtcaggagatcaagaccatcctggccaacatggtgaaaccccatctctactaaaaatacaaaaattagctgggtatggtggtgctgccctgtagtcccagctactagggaggctgaggcaggagaattgcttgaacccaggaggtggaggctgcagtgagctgagatggtgccactgtactccagcctaggcaacagagcaagactccgcctcaaaaaaaaaaaaaaaaaaaaaacattctggacttgcaagcctgttggttacttcttcaagggcctttccccaaaaatgatattttagaacgttatggaatttatgaaatcagaggtttccctgcaaccaatctatgaaaaagtaggcagggtttaaactgttttaaaactttagtcttaaattcatatttttttaatgtattaaggaagtctatccattctgtttcaatcgttttttgaaacatgaaaaggaagttagagatgaaatcattcttcatcactacaagtgatatttatccttaaatgttgacatttccccactgtgctgggcttctagatgatatctaggactacgaaatattcctgaacctagagattatggagagaaaagatgaatcacttttatatgttggttgaatttaaattagcatttctcagagagcttaatttaagtacccccaaagccaaaagtttgaaggctcaaggcccacatatttcaatttctcaggcacgttcccagtttagaggcagctagctctcacgtctgtatcactgtgactccgggagaagcagggaggttcatacgttttccgttcctgttagcaagagttcagatgatggcattccatgtcatttcaggtcacgtcaaattagactctgtgaatgccagtgtgaagaaaagagtcatttagtgttgtgcgttggtaacattttttatcaaaagctgagaaatgtgactctgaataagccacgtcttcctcagtgccaaaagtcaggacttcttatactgggggaagaaagcatggtgtggtgaaaacagtgtgctcggtggcctaatggcaagagtcactgagcattatcagacataacatgatagaaggtaacagggtacagccaacccttgaggcatcatgaaagagattgaccaaagactgatatagctgtgggttttggaagagagatagaccaaagattggacataacctccattgtggtaactgtgaagccaaattaggttctctcaggcttacctttgactgtgtttgttggacactgggatggatagttccaaattgaatgttaactagttgcatttcatggaaaaaatgaaaagcacacaaatgtatgacactgttgtcaggaataaatctaagttactatgctctttttttttcataagacataaccttatagctgagctaaggagaaacaaggcacacagatccaaatgcatgcagatccagctatcagcaactcatcttagatcttcttccattccccatttgggcttcattctctaagaccccttggcctttaggaaggtatagtatttaagtaatacttctttcccttccgaatccctgagccttggtccttatataagctgagaggtttccaggacctaatgccttcttgtcttggctcatatgccattatttataattgtgatgagattgaaaatcccaaaagctttgatgagctaggcaatttagctgatctttgcatgcactcctgtgaggaaactcttggctacctaattttcgattccaagggtgtggaatttcctagcctaaataattaagcagcctacaatgaatagaaattctctgttctctgatgatataataccgtgaactctgtccccttaccttccctgctatgtgcctcttattgcaccacacttatgcagggtattctgtgctcacacaggtatgtgtcagccatgaccaccccggctcgtatgtcacctgtagatttccacacgccaagctcccccaaatcgcccccttcggaaatgtctccacccgtgtccagcatgacggtgtccatgccttccatggcggtcagccccttcatggaagaagagagacctctacttctcgtgacaccaccaaggctgcgggagaagaagtttgaccatcaccctcagcagttcagctccttccaccacaaccccgcgcatgacagtaacagcctccctgctagccccttgaggatagtggaggatgaggagtatgaaacgacccaagagtacgagccagcccaagagcctgttaagaaactcgccaatagccggcgggccaaaagaaccaagcccaatggccacattgctaacagattggaagtggacagcaacacaagctcccagagcagtaactcagagagtgaaacagaagatgaaagagtaggtgaagatacgcctttcctgggcatacagaaccccctggcagccagtcttgaggcaacacctgccttccgcctggctgacagcaggactaacccagcaggccgcttctcgacacaggaagaaatccaggccaggctgtctagtgtaattgctaaccaagaccctattgctgtataaaacctaaataaacacatagattcacctgtaaaactttattttatataataaagtattccaccttaaattaaacaatttattttattttagcagttctgcaaatagaaaacaggaaaaaaacttttataaattaaatatatgtatgtaaaaatg

SEQ ID NO: 2 - protein, 640 aa, Homo sapiens
MSERKEGRGKGKGKKKERGSGKKPESAAGSQSPALPPRLKEMKSQESAAGSKLVLRCETSSEYSSLRFKWFKNGNELNRKNKPQNIKIQKKPGKSELRINKASLADSGEYMCKVISKLGNDSASANITIVESNEIITGMPASTEGAYVSSESPIRISVSTEGANTSSSTSTSTTGTSHLVKCAEKEKTFCVNGGECFMVKDLSNPSRYLCKCQPGFTGARCTENVPMKVQNQEKAEELYQKRVLTITGICIALLVVGIMCVVAYCKTKKQRKKLHDRLRQSLRSERNNMMNIANGPHHPNPPPENVQLVNQYVSKNVISSEHIVEREAETSFSTSHYTSTAHHSTTVTQTPSHSWSNGHTESILSESHSVIVMSSVENSRHSSPTGGPRGRLNGTGGPRECNSFLRHARETPDSYRDSPHSERYVSAMTTPARMSPVDFHTPSSPKSPPSEMSPPVSSMTVSMPSMAVSPFMEEERPLLLVTPPRLREKKFDHHPQQFSSFHHNPAHDSNSLPASPLRIVEDEEYETTQEYEPAQEPVKKLANSRRAKRTKPNGHIANRLEVDSNTSSQSSNSESETEDERVGEDTPFLGIQNPLAASLEATPAFRLADSRTNPAGRFSTQEEIQARLSSVIANQDPIAV

SEQ ID NO: 3 - protein, 648 aa, Homo sapiens
MSERKEGRGKGKGKKKERGSGKKPESAAGSQSPALPPRLKEMKSQESAAGSKLVLRCETSSEYSSLRFKWFKNGNELNRKNKPQNIKIQKKPGKSELRINKASLADSGEYMCKVISKLGNDSASANITIVESNEIITGMPASTEGAYVSSESPIRISVSTEGANTSSSTSTSTTGTSHLVKCAEKEKTFCVNGGECFMVKDLSNPSRYLCKCQPGFTGARCTENVPMKVQNQEKHLGIEFIEAEELYQKRVLTITGICIALLVVGIMCVVAYCKTKKQRKKLHDRLRQSLRSERNNMMNIANGPHHPNPPPENVQLVNQYVSKNVISSEHIVEREAETSFSTSHYTSTAHHSTTVTQTPSHSWSNGHTESILSESHSVIVMSSVENSRHSSPTGGPRGRLNGTGGPRECNSFLRHARETPDSYRDSPHSERYVSAMTTPARMSPVDFHTPSSPKSPPSEMSPPVSSMTVSMPSMAVSPFMEEERPLLLVTPPRLREKKFDHHPQQFSSFHHNPAHDSNSLPASPLRIVEDEEYETTQEYEPAQEPVKKLANSRRAKRTKPNGHIANRLEVDSNTSSQSSNSESETEDERVGEDTPFLGIQNPLAASLEATPAFRLADSRTNPAGRFSTQEEIQARLSSVIANQDPIAV

SEQ ID NO: 4 - protein, 462 aa, Homo sapiens
MSERKEGRGKGKGKKKERGSGKKPESAAGSQSPALPPRLKEMKSQESAAGSKLVLRCETSSEYSSLRFKWFKNGNELNRKNKPQNIKIQKKPGKSELRINKASLADSGEYMCKVISKLGNDSASANITIVESNEIITGMPASTEGAYVSSESPIRISVSTEGANTSSSTSTSTTGTSHLVKCAEKEKTFCVNGGECFMVKDLSNPSRYLCKCQPGFTGARCTENVPMKVQNQEKAEELYQKRVLTITGICIALLVVGIMCVVAYCKTKKQRKKLHDRLRQSLRSERNNMMNIANGPHHPNPPPENVQLVNQYVSKNVISSEHIVEREAETSFSTSHYTSTAHHSTTVTQTPSHSWSNGHTESILSESHSVIVMSSVENSRHSSPTGGPRGRLNGTGGPRECNSFLRHARETPDSYRDSPHSERHNLIAELRRNKAHRSKCMQIQLSATHLRSSSIPHLGFIL

SEQ ID NO: 5 - protein, 247 aa, Homo sapiens
MSERKEGRGKGKGKKKERGSGKKPESAAGSQSPALPPRLKEMKSQESAAGSKLVLRCETSSEYSSLRFKWFKNGNELNRKNKPQNIKIQKKPGKSELRINKASLADSGEYMCKVISKLGNDSASANITIVESNEIITGMPASTEGAYVSSESPIRISVSTEGANTSSSTSTSTTGTSHLVKCAEKEKTFCVNGGECFMVKDLSNPSRYLCKCQPGFTGARCTENVPMKVQNQESAQMSLLVIAAKTT

SEQ ID NO: 6 - protein, 645 aa, Homo sapiens
MSERKEGRGKGKGKKKERGSGKKPESAAGSQSPALPPRLKEMKSQESAAGSKLVLRCETSSEYSSLRFKWFKNGNELNRKNKPQNIKIQKKPGKSELRINKASLADSGEYMCKVISKLGNDSASANITIVESNEIITGMPASTEGAYVSSESPIRISVSTEGANTSSSTSTSTTGTSHLVKCAEKEKTFCVNGGECFMVKDLSNPSRYLCKCPNEFTGDRCQNYVMASFYKHLGIEFMEAEELYQKRVLTITGICIALLVVGIMCVVAYCKTKKQRKKLHDRLRQSLRSERNNMMNIANGPHHPNPPPENVQLVNQYVSKNVISSEHIVEREAETSFSTSHYTSTAHHSTTVTQTPSHSWSNGHTESILSESHSVIVMSSVENSRHSSPTGGPRGRLNGTGGPRECNSFLRHARETPDSYRDSPHSERYVSAMTTPARMSPVDFHTPSSPKSPPSEMSPPVSSMTVSMPSMAVSPFMEEERPLLLVTPPRLREKKFDHHPQQFSSFHHNPAHDSNSLPASPLRIVEDEEYETTQEYEPAQEPVKKLANSRRAKRTKPNGHIANRLEVDSNTSSQSSNSESETEDERVGEDTPFLGIQNPLAASLEATPAFRLADSRTNPAGRFSTQEEIQARLSSVIANQDPIAV

SEQ ID NO: 7 - protein, 637 aa, Homo sapiens
MSERKEGRGKGKGKKKERGSGKKPESAAGSQSPALPPRLKEMKSQESAAGSKLVLRCETSSEYSSLRFKWFKNGNELNRKNKPQNIKIQKKPGKSELRINKASLADSGEYMCKVISKLGNDSASANITIVESNEIITGMPASTEGAYVSSESPIRISVSTEGANTSSSTSTSTTGTSHLVKCAEKEKTFCVNGGECFMVKDLSNPSRYLCKCPNEFTGDRCQNYVMASFYKAEELYQKRVLTITGICIALLVVGIMCVVAYCKTKKQRKKLHDRLRQSLRSERNNMMNIANGPHHPNPPPENVQLVNQYVSKNVISSEHIVEREAETSFSTSHYTSTAHHSTTVTQTPSHSWSNGHTESILSESHSVIVMSSVENSRHSSPTGGPRGRLNGTGGPRECNSFLRHARETPDSYRDSPHSERYVSAMTTPARMSPVDFHTPSSPKSPPSEMSPPVSSMTVSMPSMAVSPFMEEERPLLLVTPPRLREKKFDHHPQQFSSFHHNPAHDSNSLPASPLRIVEDEEYETTQEYEPAQEPVKKLANSRRAKRTKPNGHIANRLEVDSNTSSQSSNSESETEDERVGEDTPFLGIQNPLAASLEATPAFRLADSRTNPAGRFSTQEEIQARLSSVIANQDPIAV

SEQ ID NO: 8 - protein, 241 aa, Homo sapiens
MSERKEGRGKGKGKKKERGSGKKPESAAGSQSPALPPRLKEMKSQESAAGSKLVLRCETSSEYSSLRFKWFKNGNELNRKNKPQNIKIQKKPGKSELRINKASLADSGEYMCKVISKLGNDSASANITIVESNEIITGMPASTEGAYVSSESPIRISVSTEGANTSSSTSTSTTGTSHLVKCAEKEKTFCVNGGECFMVKDLSNPSRYLCKCPNEFTGDRCQNYVMASFYSTSTPFLSLPE

SEQ ID NO: 9 - protein, 422 aa, Homo sapiens
MRWRRAPRRSGRPGPRAQRPGSAARSSPPLPLLPLLLLLGTAALAPGAAAGNEAAPAGASVCYSSPPSVGSVQELAQRAAVVIEGKVHPQRRQQGALDRKAAAAAGEAGAWGGDREPPAAGPRALGPPAEEPLLAANGTVPSWPTAPVPSAGEPGEEAPYLVKVHQVWAVKAGGLKKDSLLTVRLGTWGHPAFPSCGRLKEDSRYIFFMEPDANSTSRAPAAFRASFPPLETGRNLKKEVSRVLCKRCALPPRLKEMKSQESAAGSKLVLRCETSSEYSSLRFKWFKNGNELNRKNKPQNIKIQKKPGKSELRINKASLADSGEYMCKVISKLGNDSASANITIVESNATSTSTTGTSHLVKCAEKEKTFCVNGGECFMVKDLSNPSRYLCKCPNEFTGDRCQNYVMASFYSTSTPFLSLPE

SEQ ID NO: 10 - protein, 296 aa, Homo sapiens
MEIYSPDMSEVAAERSSSPSTQLSADPSLDGLPAAEDMPEPQTEDGRTPGLVGLAVPCCACLEAERLRGCLNSEKICIVPILACLVSLCLCIAGLKWVFVDKIFEYDSPTHLDPGGLGQDPIISLDATAASAVWVSSEAYTSPVSRAQSESEVQVTVQGDKAVVSFEPSAAPTPKNRIFAFSFLPSTAPSFPSPTRNPEVRTPKSATQPQTTETNLQTAPKLSTSTSTTGTSHLVKCAEKEKTFCVNGGECFMVKDLSNPSRYLCKCPNEFTGDRCQNYVMASFYSTSTPFLSLPE

SEQ ID NO: 11 - protein, 850 aa, Homo sapiens
MRQVCCSALPPPPLEKGRCSSYSDSSSSSSERSSSSSSSSSESGSSSRSSSNNSSISRPAAPPEPRPQQQPQPRSPAARRAAARSRAAAAGGMRRDPAPGFSMLLFGVSLACYSPSLKSVQDQAYKAPVVVEGKVQGLVPAGGSSSNSTREPPASGRVALVKVLDKWPLRSGGLQREQVISVGSCVPLERNQRYIFFLEPTEQPLVFKTAFAPLDTNGKNLKKEVGKILCTDCATRPKLKKMKSQTGQVGEKQSLKCEAAAGNPQPSYRWFKDGKELNRSRDIRIKYGNGRKNSRLQFNKVKVEDAGEYVCEAENILGKDTVRGRLYVNSVSTTLSSWSGHARKCNETAKSYCVNGGVCYYIEGINQLSCKCPNGFFGQRCLEKLPLRLYMPDPKQKAEELYQKRVLTITGICVALLVVGIVCVVAYCKTKKQRKQMHNHLRQNMCPAHQNRSLANGPSHPRLDPEEIQMADYISKNVPATDHVIRRETETTFSGSHSCSPSHHCSTATPTSSHRHESHTWSLERSESLTSDSQSGIMLSSVGTSKCNSPACVEARARRAAAYNLEERRRATAPPYHDSVDSLRDSPHSERYVSALTTPARLSPVDFHYSLATQVPTFEITSPNSAHAVSLPPAAPISYRLAEQQPLLRHPAPPGPGPGPGPGPGPGADMQRSYDSYYYPAAGPGPRRGTCALGGSLGSLPASPFRIPEDDEYETTQECAPPPPPRPRARGASRRTSAGPRRWRRSRLNGLAAQRARAARDSLSLSSGSGGGSASASDDDADDADGALAAESTPFLGLRGAHDALRSDSPPLCPAADSRTYYSLDSHSTRASSRHSRGPPPRAKQDSAPL

SEQ ID NO: 12 - protein, 280 aa, Homo sapiens
MAWPDAAGLLLSAAAAATGEGSVQQLQRQQQQQREQVISVGSCVPLERNQRYIFFLEPTEQPLVFKTAFAPLDTNGKNLKKEVGKILCTDCATRPKLKKMKSQTGQVGEKQSLKCEAAAGNPQPSYRWFKDGKELNRSRDIRIKYGNGRKNSRLQFNKVKVEDAGEYVCEAENILGKDTVRGRLYVNSVSTTLSSWSGHARKCNETAKSYCVNGGVCYYIEGINQLSCKCPNGFFGQRCLEKLPLRLYMPDPKQSVLWDTPGTGVSSSQWSTSPSTLDLN

SEQ ID NO: 13 - protein, 720 aa, Homo sapiens
MSEGAAAASPPGAASAAAASAEEGTAAAAAAAAAGGGPDGGGEGAAEPPRELRCSDCIVWNRQQTWLCVVPLFIGFIGLGLSLMLLKWIVVGSVKEYVPTDLVDSKGMGQDPFFLSKPSSFPKAMETTTTTTSTTSPATPSAGGAASSRTPNRISTRLTTITRAPTRFPGHRVPIRASPRSTTARNTAAPATVPSTTAPFFSSSTLGSRPPVPGTPSTQAMPSWPTAAYATSSYLHDSTPSWTLSPFQDAASSSSSSSSSATTTTPETSTSPKFHTTTYSTERSEHFKPCRDKDLAYCLNDGECFVIETLTGSHKHCRCKEGYQGVRCDQFLPKTDSILSDPTDHLGIEFMESEEVYQRQVLSISCIIFGIVIVGMFCAAFYFKSKKQAKQIQEQLKVPQNGKSYSLKASSTMAKSENLVKSHVQLQNYSKVERHPVTALEKMMESSFVGPQSFPEVPSPDRGSQSVKHHRSLSSCCSPGQRSGMLHRNAFRRTPPSPRSRLGGIVGPAYQQLEESRIPDQDTIPCQGIEVRKTISHLPIQLWCVERPLDLKYSSSGLKTQRNTSINMQLPSRETNPYFNSLEQKDLVGYSSTRASSVPIIPSVGLEETCLQMPGISEVKSIKWCKNSYSADVVNVSIPVSDCLIAEQQEVKILLETVQEQIRILTDARRSEDYELASVETEDSASENTAFLPLSPTAKSEREAQFVLRNEIQRDSALTK

SEQ ID NO: 14 - protein, 720 aa, Homo sapiens; identical to SEQ ID NO: 13

SEQ ID NO: 15 - protein, 136 aa, Homo sapiens [sequence omitted]

SEQ ID NO: 16 - protein, 56 aa, Homo sapiens [sequence omitted]

SEQ ID NO: 17 - DNA, 401 bp, Homo sapiens
aagctactcaattttaagttttcatttttgaattcaagcttttttggttaggtaaagaatagaagtaactaccataaagaagaaaatataatcatctaatttctcctgaactctgtataacattggccattaatctacatcaatatatggtgaagatatgtaagcagaatgtacaatgtataagacatgcatatatcaatrtaaggtagtaatgtttattttaaattccgcagatccatttagattcctttggttttatatttggtctattttgttactgcctctataattctgcttatttatttcaaattttacaacatctatttctcctttgagaaaacgtagacaactgatattgggatagagtttaaattgtgagaaatattcagttacagtaaaag

SEQ ID NO: 18 - DNA, 401 bp, Homo sapiens
aaatgcattagaactagaacttgcgtgattttaaattttattagaagtaggtgtcaagttacctaagatgtccaagagacagctgatgggttatgagttaaattttgggttctgcttatcatttcttagaaatcaatttaaggcatcagttttcaatagcttttttatgtataactaaaaaagagatatatgatatttggyaaaataaagatacatggcttccagtctcttgagacatctgtcttcatgaaagagatggagagttcccatttctacttacaagaatgaatgtatgtcataataaagaccagctatcatttgttatatacaaaatatgtggttctttctttgactttttttctggatttagacaaccacagatgacatttatgagaaatgaa

SEQ ID NO: 19 - DNA, 401 bp, Homo sapiens
aaattgtcccttttctgaacagcatttaatcatactgaacaattattcataccttttcttaagcatatgttaatcatattagaaatgccattcccttctcgtgcaaaagggcaaaatcagcaacatccttccaatgtgggtgggtaaatgaaggctctgatacaagaattgaaatgaaatatgtgtgcaaacagttcttaktactgagctgtttaaagaaggcctacctttgcacagaaaatgtctataagaattactcattaatgccacttaatagaggaagagtaggagataacgtgggaacagggtctttttaaaaaataccactttaaagaagaggcttatgcttcatcatagacaaaatgctttgtatagtactaacaggggcatatctattcctt

SEQ ID NO: 20 - DNA, 401 bp, Homo sapiens
atatagtgacagataactgatacaaatctggaaggtagagaggaagaaagtgttctaggccagagttgtacctcccaaaaagtcgagtcagaaatatgggaggccaggctaaagaaaagtaaagaaattagtaggattggatgtttgaaccactttctttcagtaaatcgctagaagcacccatgcagggttcaagtgaaygtatactggaggccagacctgcccaactatgctgctaaatggtgatcttctcctgaagcgctccatcagggtatgagtaacagggaactccccttgccaagacacacagggagtgtgatgaccctgtccctccaaactgcactttgagagaatggaaccttgttttgtagccaactatattatgccaagaacaaaaagat

SEQ ID NO: 21 - DNA, 401 bp, Homo sapiens
agcccgcacgcacctcgcaccatgagatggcgacgcgccccgcgccgctccgggcgtcccggcccccgggcccagcgccccggctccgccgcccgctcgtcgccgccgctgccgctgctgccactactgctgctgctggggaccgcggccctggcgccgggggcggcggccggcaacgaggcggctcccgcgrgggcctcggtgtgctactygtccccgcccagcgtgggatcggtgcaggagctagctcagcgcgccgcggtggtgatcgagggaaaggtgcacccgcagcggcggcagcagggggcactcgacaggaaggcggcggcggcggcgggcgaggcaggggcgtggggcggcgatcgcgagccgccagccgcgggcccacgggcgctggggcc

What is claimed is:

1. A method of reducing and/or protecting against disorders associated with neuronal cell damage in a perinatal subject in need thereof, comprising:
administering a therapeutically effective amount of neuregulin (NRG) and a pharmaceutically acceptable carrier to the perinatal subject.

2. The method of claim 1, wherein NRG is neuregulin-1 (NRG-1).

3. The method of claim 1, wherein the perinatal subject is a neonate born prior to 32 weeks of gestation.

4. The method of claim 1, where in the step of administering further comprises administering neuregulin to a pregnant subject.

5. The method of claim 1, wherein the perinatal subject is a fetus.

6. The method of claim 1, wherein the method further comprises increasing ErbB-receptor expression.

7. The method of claim 1, wherein the neuregulin is administered in conjunction with an endogenous protector.

8. The method of claim 7, wherein the endogenous protector is selected from the group consisting of glucocorticoids and thyroid hormones.

9. The method of claim 1, wherein the neuregulin is administered in conjunction with an exogenous protector.

10. The method of claim 1 wherein the step of administering the therapeutically effective amount of NRG is at least one of an oral administration, a parenteral administration, an intravenous administration, an intramuscular administration, an intraamniotic administration, a sub-cutaneous administration, a transdermal administration, an intratechal administration, a rectal administration, intravaginal administration, intra peritoneal or amniotic administration, and an intranasal administration.

11. A method of assessing whether a perinatal subject is at risk for developing a neurological disorder associated with neuronal cell damage, the method comprising:
evaluating levels of neuregulin wherein a reduced level or lack of is an indication that the perinatal subject is at risk for developing the disorder.

12. The method of claim 11, wherein the perinatal subject is a neonate born prior to 32 weeks of gestation.

13. The method of claim 11, wherein the perinatal subject is a fetus.

14. The method of claim 11, wherein the step of evaluating comprises measuring expression levels of neuregulin.

15. The method of claim 14, wherein the step of measuring further comprises measuring expression levels of ErbB receptors.

16. The method of claim 14, wherein the step of measuring comprises measuring levels of at least one of a ribonucleic acid, a deoxynucleic acid and a protein.

17. The method of claim 11, wherein evaluating levels further comprises analyzing neuregulin for one or more single nucleotide polymorphisms.

18. The method of claim 17, wherein the one or more polymorphisms comprise SNP8NRG221533.

19. The method of claim 11, wherein the step of evaluating levels comprises measuring activation levels of neuregulin signaling pathways.

20. The method of claim 11, wherein the step of evaluating levels further comprises analyzing at least one ErbB receptor gene for one or more single nucleotide polymorphisms.

21. The method of claim 11, wherein the disorder is at least one of cerebral palsy and mental retardation.

22. A method of evaluating a risk of a NRG-1 deficiency in a perinatal subject, comprising the steps of:
assaying a sample from the perinatal subject for a polymorphism associated with decreased expression of NRG-1.

23. The method of claim 22, wherein the perinatal subject is a fetus.

24. The method of claim 22, wherein the step of assaying the sample further comprises obtaining the sample from a fetus in a pregnant subject.

25. The method of claim 22, wherein the perinatal subject is a neonate.

26. A method of evaluating risk of a neuregulin deficiency in a perinatal subject comprising:
providing a nucleic acid sample from the perinatal subject;
determining a single nucleotide polymorphism (SNP) genotype; and
comparing the SNP genotype with a predetermined SNP genotype, whereby the perinatal subject is predicted to be at risk of a neuregulin deficiency if the SNP genotype comprises at least one of a SNP8NRG221132, a SNP8NRG221533, a SNP8NRG241930, and a SNP8NRG433E1006.

27. A method of diagnosing or predicting risk of a neuregulin deficiency in a perinatal subject comprising:
determining a presence or absence of a neuregulin polymorphism, wherein the polymorphism is at least one of a SNP8NRG221132, a SNP8NRG221533, a SNP8NRG241930, SNP8NRG243177 and a SNP8NRG433E1006.

28. The method of claim 27, wherein determining the presence or absence comprises enzymatic amplification of nucleic acid from the perinatal subject.

29. The method of claim 28, wherein determining the presence or absence of a polymorphism further comprises restriction fragment length polymorphism analysis.

30. The method of claim 28, wherein determining the presence or absence of a polymorphism further comprises sequence analysis.

31. The method of claim 27, wherein the method further comprises determining the presence of a SNP8NRG221533 polymorphism.
